United States Patent Application Publication US 2011/0189663 A1 - sequence listing, part 8

SEQ ID NO: 5683 - DNA, 420748 bp, Homo sapiens
  NAV3 gene - 76727665 - 77108412 of chr12; NCBI Entrez Gene ID: 89795; Build 35; sequence includes 20,000 bases upstream of initiation codon and 20,000 bases downstream of termination codon of the gene
tccaccaccatcaagtctccgtcaaattatttggttgtacattttcaaggaatatttctttttatcaaagcactttttcaagtttgatactaggccttgttagtttgattatatacctaatttatttaatcttccacatttgtcagaaggggctcacctaagctttcccagcacctaacataatgcacaacacatagtgagtgtttaataaccacttgttgactgaatgactgaatgaatacaaaatacaacataagcattcaaataagttaacttggggttggaattgtcaaggaaggtcttaagacaatggcattaaattgacactaaacaaagggaaagaagtggataggtggaaagaaggaagagaagcattttctgagagtagggtaaaataagacagcataacacaaaactaagcattttaaagtgaacaattcagtgacattaatacattcacaatattgtgaatttgccaactcaaactagttcccatttttatcaccttaaaaggtaacctgctatcgccagccatgattccatcatcactatatttttatttaccttcacccttgacacttcttcatcgtattcagcaaatgaataaatataagcatagataattttattctattcttcttggatttctttactcagtgagatgtgctctattttttactgtgttcctttacttgcctctactttgaaacaacagcccatatcctgttgctaaactccatgctgttcagattatttaattgagacaaactttagcttctattccttcaactgaccttatgccctccttggactgaaagcatttagaaaaccccctctgatggaaacccaattaatgagtgaaacaaataaataacttaaaaaatagtgtttattaaatgactttcatttccctcctctaaactttcattatcatttcagagatcaaagatttaatcccaatgaaaaactgaggaatttcatttctttctttttttttttaacttttatttttttgagacagtctcactctgttgcccaggctggagtgcagtgtggcactatctcggggctcactgcagcctccaccttctgggttcaagcaattctcctgtctcagccttccaagtagctgggattacaggcacctaccactatgcccggctaatttttgtctcgttagtagagatgaggtttcaccacactggccaggctggtctcgaactcctgacctaggtgatctgctcacctagggcgctcccgcctggcctcccaaagtgctaggattacaagtgagagccactgcacctggtcaggaatttaatttctaatgtgataacagtcacacttgatcattgagcaaatctcagggattgacacagatattgtttataaataaaaagtcaccaaattaattaattaattagtttagagacagagtctcactctgtcacccaggctggagtacagtggcatgatcttggctcactgcaacctctgcctcccaggttcaaatgattctcatgcctcagcctcctaagtagctgggattacaggcatgcatcaccatgcctagcttttatgtttttagtagacacggggttttaccatgttggccaggctggttttgaactcctggcctcaagtgatccacctgcctcagcctcccaaagtgctgagattacaggtgtaagccatcatgcctggcctaaaagacaccaaattcttataggtaataggattactcttagcccatcagtgcctggttagagtttacatacaagcaaggaacctatgtgtaggggacacaatgtgattttctcagctcaacattgattactcattcatttgctgattgtacactcattttactttggagaaccagccattctgcaattgattactgtcttggtggaactatatatcagggttctctgcctttccaggttgttgggtagggatgtgaaccaagtttcaagagtcaaattgcttttccaggaatgttaagtttgagaagagtagcaaatctggaattgatcttagaagaccctgaagaaattgcctattagttcctgtcattcagatcaccagatatcattgatttaacttatcctgcagttctctgtgcaattctgcatcacctcccagtagctatatttatacttggagggcctatcccaaatcctaaagctatctcattgataataacctgagagaaagaaaaacccatcaaaataaaagggcttagggcaaacagaataaatgtgtatctaagaaaaagttgttcataaggaagcaaaaagataggatgggtcagaaaccacacagtcggcattagattccttcatatgactaatagcaagtactcaaaagattagagcctgtcactgatctaaaatattttagtgaagagtggcacactctaatactttaatgccctcatttatttcagtatggttttcttgcatctaatgtaaatacatctcagcgatttttaaaagtaaacctctttcttgctcttctccttgtagctcactacaaaactgatacacagagtagtgtccccatgtcatcattagtagcagcatttaggaacttgttagaaaagcagatcctcaggctgcacctcacatctactgtttcagaggctctggggtgcggagcccagcatctgtgtttcggcaagccctctaagtgatcctgagattcactaagagtaaaggaccactgatcgaatattctgccagagttcctcaggcactcacaagcctaatttcctaaaggaggaaatgtatcattgcccaggaagactcatgtcccttcgtatgtggagaaaaaaaaaaactctaatgttgatacaacatcccaacatctcctaacattttctgccctatgacaaatttcacaagaatcattcgagaagatgtggcctccaaatcaaatattctgcttttctgccgtggtttgacattgaactctaattctaccaaactctataccatgcaaattaaaagagaaataaataaagccatggagatctttatttgaaatgttacaccaagaaaacaacaataaggagaggaggttgaattcaaagggaatggctgggttagagccaattaaaacagctgatgtgtggtaagcagaggcagttaaagaagggcacaataaacatcccttgggagggacagtggagaagcagcttgtcaactgagaaagtaggccttaatagcacaggcctactttcgtccttaattagactgaaattgcccatcagtggcactcacctgtgattaaaaaccaacaacaagcaaaaagtaaaatactggatgtgccaactttaaaccaagttcagactgtgtctaagcttttcacctcgtccatggttttaagacactaattaatacactgctgttaatcagtgaggttggggacttcaagatcttcttgagtgtgcagccccagtttcaggagaggaagagatatttttttcttttttctaagagtggaaatatatgctgctagacatgctgactttaccatcacttacattggcactgttcatggaggaatcttggaaaactgtcaggaaatgaaactatcttgatcatcagagtaaagaagtatgatagcagcgagtgagccccagtggcagaagggttacacagtccttgaattttagttctggctctattcactacaagtcagacattcttcattattccccagtaaaatttttaggctgaataaataggtaaagcaaaaagcaaataacttgcagatagtaattttggtcatgacaaactatttaacttagtatagtcttaatgatgggattacagtcacttatactgtttatattgaagcacatgagggtctgtcttgatcaggaggctactggagtgagcagtgttgcaattactttagaaatcctcttggtgaaatttgaatatcttgccctgtgaagttactgttatggtattatgctactgttttctctcattactagaattacagcatatagattttcaggagcacacagtaaatattgacttttttttctaaatatttttgcaggctaagggtctctactatgattaaacaaattaaatataatgcatttaaaaatcctgatatagctcctgatgaatgcatttccaaattatcatgtgtatcatctccaataagttgaagcttttaaaattacatcatagtccatataatgaccactttatattagaccatcacagttgtaatataaaatgtggtcatggcttactgagatgtcataattcatcaaatcttttttttcccgacatcgcatctccacatcctttctgaacagtacactgtaatttttagattgccaagtatgatctatcaaaatgagaacttgggtgtggtacttagcaacttttagatataccaataaaacaacaacctaatgcctaaagaaaactgggtaattttatattaatattttatggtatttttggaacctcatatgagtatgcaccagaggagggttagaagttgaaatgcattattatatgtcaagctggtatcatatatcaaatgattttagaggacagggagctaagaacaggagtactgggaaatacaagatagaatttcaaaggcaggaagaagcctgatgggaaaaaaattaagggtgaattggtggaaattcatggataattgcaaggaatgctcaagggagataaactttatattcattggaaagggttaagaatgaagactgttacaaatactagacacagaaggtctggaaacatagaccatgattttatgatggattaatccatagtttcagacttgttcaacatcctgcagatatgatcaatgtgtaaataagtgttttaactcagtaacagcagaaggtgcatttttagagagaggaacacttgacagcctccagtaaagtgaaaatgggaagtcactgctttcagtttgaataggattggtattggaacagtagtgtcagatagtctctgagatgaagtcatttgactctctttcctttgagttaattattaagtactatccagaagttctttatccaatgcaagcacaaattaccaggcaaagcacaggtaaagccaccaggtagcttctgaaaagtgttgttatctgcagccttcttgcatggtgcttggttgtgaactccacatgtgctcggctatcatctgcggccacctctatgcagctaataggctttggacatcacttatggattcaatgtgttgtgccatttacctccatgtttactcttttttatcatctgtcactcctttacctctgcttccctaaaccagagagaaaaaaaatcgtatatcaatatgcagaaatgcaaaagttacttgaaataaatagtgttggtttaggactttatgttttagctcaattctaaacatccttgtgattcctaaactatggcaggataagctttccagggaacatttaaagcttgccgttcagagagaacagtaaagtgccatgtatatgttaactctaagaattcttccttattgacaaattgaattgggcaaaggtgtggctgcacggctggtattttatctgcaactgtcaaactctggtagttctttttcattttgactttttattctattttccaatctattatcctctttctatcttctggtggatatctgttgacctttaatccttacttactgcatacactttggtgatcactttatggaaggatccttgctagggctcagatgctgaggaagaaatggcatcaataaaatataaatgggaaagagaaaatgagagcaagcaagctttaaggcttatctaaatggagcagacagttttaggtttggaattgccacaccctctgtaagattcacttgtaattttatacttctattgaatattctgcagaataataagccctgctctttgccagagatgctttgtttaaatcaaatcctctggagaaaatctcaaaagaaatagctgctgagtttacttaatataagaagtttttttttaatttaaagtttccttgacagagtcgtttgttgattaaaatgctctgccaagttcttctagtgattccgtcaagaccaaactatgcttttttttttaaactgcagatgcaaatgttaacttcacctgaggtttctctagcaaagcattttcttcttttcagaagctcttaacactgccagatgtgtaattaaatggtcatttcacttttattataattttgtggctttttaaaattatttttcttgtttatgtacactgtagcagttatggtcaccatatgctcgttatgtaagatagctcttaacacccagctgatagatgcaagctgttggggaaaaatccccactggtctcctatttatctaattttaatcctcaaaggtaaattcagctggataaatgtgttcctaagcatctttcacctgtcagaaaatatttttatgtagttcctctaacaacatgaaggaaaatgtctgcctctctagaacttgattttgccactagttactttgtgctattgagatagtacttttgagataaaagatacaataagccaataaagtagaagctaaagtgtgatgatataaatatatgtataaactagctttttggagggataggtgggataggtggaagagaggaggaaaggatttcttcctgatgaatataaacaaaaacaatttaaggaaaatgcaagtttaataatttaaccaatacttagtaagccatgcaactgaacttattttccctaaagttattatcctataaatcacaaatattttatttcataagaatctgaggtctgtaccgttgagagtgcaaatataccattattatagaaagagtttgcagaaataaaactcctagaatgtacatgcattaagtcatgatttttaaaactgtcctatgaaaatgatatagtctctaatgagcaattttaatgtttagtaagaaacagggaaattgtttttatgggagaagaatccatcccatcacgttagaattacaaaactttccatttatgtttgctcaaagttttctgttttgtttggtttggtttggtttgcctgtttttgacagaaagtgtggaaagttggcagtgtctttgcagggatgaggggtatgtgattgctaacatactttgctttcaatgacctcatgtaaatgttagggaagtctggaggaaatcaatgcatttacaataatccaggttagtatctgatggtctccattagaaaagtgtttagaggggaggaaacgcataacaaattaccgctcatcgttcacatttaatattgcgtcgattctgcatttgaggaaatcaatttttgttctttctattccagaaatatatgtgagagattttcttttacttatataaagaatatgaaaataaatgtattaattagtattccaagtttaattaatgaccaagtcagattcttttaaaagtaaacaaatagctcatttcccggattgtatatattacacatttatatgtaatattaattatgctagttgttgatagatttcagcccatcccattttcagcaaatctgatgaactttattccttttaattttggctatgcaaacttctttctttaataatattaaaatgcattacatgcatttccaatgactaaaaatatatctatcagtgagaaggaaactgctggattttaaatcttctcacagctattgtagaaattaggaagaagaggactcatgcgtgcaataggtgttactgggaacgttttatgagaacaataggaactttataagatttttcacgtttacccttcactcatcccctttttcttcacgtctcaactgaatattaacataactataatataagtatgctaaacattctgaaagtacaagcattgactaataatgaggattttaagctgaggtccctcagggtacaaacttctttaggtgaaaatctagtatgtcactaattacttaaaggttatctacaaattttcctttattctcatttctttgaagtttgtgaaacttcttcaattcactaaaatgtagctagtgaataaagtaaaataagagttaagttttagatgccaaatttagttgtccatttttttctactctcaccgttgctctataccctaaatcttacaaatacagtgggaaagcattgaggaggggattaaaaatgaaatgttttatgaaaatatttagcaagacaatatggacacaggaaaagtgaagaagttcctcatatatatcttatgttgataatgatacaaaattttacatgaaaaatcatatttacagaaatctattctgctttttcaacattatgctttattactcaccaattctcatggtccacacatttaaaacaggaacgagaaagatattttagggcaacatatgtgtggttcgtaaaaccaataagcagggtatatgcaagaaagagctcggcaactacttctgttgctgtcagaaatcattgtgaaatttcatgaaaaggaactcttgagactatgataatatggaagtaaaggggaatgcatatatggaaattaacattcttctaagaaaaatgattggctaaagaaaatggacagtgaggtcagtagagaataaaatgtcaataaattgaagtgtgtgtgtgtgtgtgtgtgcacacgcactattctggtaagaagcagataaaaaaggaaaggaaaactttgaagggtttacgtagactttttgatcactttgcatcttttatagtaggtttctatatatttctgaatctaatgtattagatgcctgtcttagtccattagtgctgttataacagagtaccacagactggtaatttctataagaacaggaatttatatcccatagttctagagcctaggaaatcctagatcaaggcactgacatctggtgagggtcttctggctgcatcttcatatgttagaaggtggaaaggcaagagaggggcgacctccctccatcaagtctttttataaaggcacctaatcccattcatgagggcagagccctcacgattcaatcactttccaaaggccacaaccgccaatattgttgcattgaggattaagtttcaacatgaaatttgaaggtgacaaaaacattcaaaccattgcaatgtctgacagagagatgtggttttccagttaatggtctcattttatgtctgggctattaaaaacatgaccattgcatatagctgggaagatcgcacactctaccagtgtgtgtgtgacaagcactacaacctcaagtggttgttgactctgcatcactggttttgttcagtggaataagcagatattaataatgtatatgtaattttatgttgctgcctttttaaatggtgccataagatttccttaaagtgactatattttatttatacttactaaatatagacccagcactgaataaattacacaaaataatagaagagtcataatcagatcttatgttttcattatcatactttctaatttcctattcttttttatgacttcaggtaggttgaaaaagaggtatctagctgaatctctcaatattcctctctctctttcttattatctgtctctgcccatcacacacacacatgtacacacacacatgttcgcacaaacacacacacacacacacacagctgttttgaaatatcctcagagttcctagtaaaatgctgcatgatctgaaaaagacaaatttttgaagctattgatggggtagcttttctgggtggttcctagaaaggatctggatgttagttagatctgaagtttagaacctgtactggaactgggaactggaactgattacaggcagcaattactttaactcattacttagattaaaatcataggctaattatagtgttaccctgtgttaaaatataagaataaagtttaaatgtttaagaaaagatttactctcaatccctgaacgaaacctaatgcatccttagaatatctgcaataaagcaggagatggttaacatgtggattctgaaggggtaagagcaatggttacatggtgcttgggatgtgaaaatgtgcagtattccaagtgatcctataaatctttcacaattacaagttacaaccattgcaaatgacatttttatgataccttttgaatggcttggctttggtgtgccactcttttatgttttagccaattttatttgtatataagcttcaaaaatatgtgaaaataagaaaattggaaaggaagcagtagtgaaaatgatacctttataaaacactgttattatacattgttacatctcaacatttttggccgcatttcccaggaccaaactgttaaaacttgtttgagatgtcttcatctttttataacacagtatatttgtgtacccatattccaacaagaatagttctttcaagcataactgtttttttaggttgcatttttttagcattcatttggatttttaagggtctgctgtcttactggaacactgaaatttatctggcaagaatatccaatgattttgttttaatggaatagttgtcctttttccagatgtgtattttttttcactcggggagctgatatcctggaagcaagggtattaacatgcaatgccattccaaagctgactacatttgcttttcattatactttatggttaagagaccctctgaatttgataaattttatttgctcaactaactctatcagtagcatgttgtaaagaagcctgtagggtagtaaatgcatgtcatagagcatatataaacaatttccacctctcctgagaagttcctcgttttaggtggacattgtgtgcattctttaaaaatccgttagctgtcttactatttaatcccttgtactcatcacctgcttttatgttttagccagctagtttacctttcttttgactgattcaataccacaataaagacacatcttggcatattgccccttgtgcccacaaatacactgtatgagcagagtatacctaatacttctttatgcatccatttttttctgagatatctgaaaaaatgatttcagtgggaatactggtaagaaaaattctaaaacagatcttagtgtcttatgtgttagaagccaggtctggagaatagttttaacttcatgctcagtatatcttatcttattttttattctttaaatttcctcagtgaagccaggcctggataataaacttcatgctcagtatatcatatcttattttttattatttaaatttcctcattagtcctgaagacaatctattcaaatcattcaaacattttgcaacttgttagtacgagtcatttattctctggggtttaagggaagttcttacctggatgaaggataattttaaaaaatgaaggttcttaaggtcgaatgtgaaagtgataatgcacaatacaatttcagaatggattggaaaaaaaagaacagttaataatttgactctttacttctgcttctattatagactaacagggatcatatttacttccctccaccttaagtataaactgaacaaaagcatataaagcaatattattcagccactggacaatagacaatacaggacaatggttcctgaaagaagggtaatcaaaggggaaagcttacaactgtgctagttgacttcctggaggcaatatccagaccacagagtagagatggagaacccaaatagagttcagaagttttgctgacccttagaaatagagatcaaagtttaggaaagcctcaagggctaaaattttggagccaaagtaccagaaaagaaggaactgcagagagagagagagaaagataaaatgagatagataaacagacagagagacacagagagagatacaaagagataggagagaatgaggatgagcactggagacttacagagatgtttcttctaatctttgacagaggacttatagaggaaacaagcaaatgccagagaaaggaccagcagaaagaagtatgagaaataattgctagcactcacacaaggttgggaatagttgacgttttccccagccagagtgaaaagaccacaaggtgtgtgttagattcacaaaattgtatttctttacaaatggtgcaaaattagctctaggcaatcagatctgtaccttctttaacaatttatttaaaatgctcaaaagctacttaactatgtgccattacaaaatcaaatcctacttgaaatccagtatacaagtgtacaattcaaaatgtctaccatctagtaaaatattaccaggcatgttaaaaagcaatgtgacatgactcatatccaggagggaaaaaaatccattaatggaaacatacttaagaaatggcagaggtgatggaattagcagacaagttgttgttaaaacaactattataaatatgctccatatgttcaagaaggtagaaaaacaaatgtgataaggagagacatggaagaaagaaaagacacccaaatggaactcctagagatgaaaaagtatagtgtgtgaattaaaaatacatgagacaggattacaacagattaaataatatagaggtaaagattaatgaacttggaaacagtaatagaagttatgtgaatgcaaaatgaagcacagagagtaaatttttttttagacagagtctcactctgtcaccaggctggagtatagtggcacaatcttggctgactgcaacctccgcctctcgggttcaagtgattctcctgtctcagcctcccgagtagctgggactgcaggcgcatgccaccacgcccaactaaatttttttttttttttttttttttgtatttttagtagagacagggtttcaccatgttgcccaggctggtctcaaactcctgagctcaggcaatccatccgccttggcctcccaaagtgctgggattacaggcatgcgccactgcgcccggccgagagtaagatttttaaagccttgaaaaattaattgcattagtaaccgtggcatgaaagcaggtggtccaacatacataattggagccctagaaggaagagggaggtagaaaataagtttagaagaaactaaaaagtttccaaaatttgatataaactataaaaaggtccaatgaacataacacaacctgaacaaaacattaaaaaaataaaattgctggccaggtgcagtggctaacacctgtaatcccagcactttgggaggccgaggaaggtggattacctgaagtcaggagtttgagaccagcctggccaatatggtaaaaccctgtatctactaaaaacacaaaaattagctgggtgtggtggtgtgtgcctgtaatccaagctacttgggaggctgaggcagcaaaatggcttgaacccaggaggcagggattcccgtgagccaagattgcaccactgcactccagcctggtgagagaacaagactccgtctcaaaaacaacaacaacaacaacaacaacaacaacaaagaaaatcaaatagctaaaattagtgataaagaatatcttatcagaagttggataatacagtcaggatacatagaaaggaacaaagatcagacatgtgatggacttcttagaaactatgcaagggaaaatacaatggtgtggcatctttactgaagaagaaaaattgttaactaagaattttgtacccagaaaataattctttcaaaaacggaggcaaagcaaactcttttttagccaaacaaaagctgagacagttaattgccagcaaatctgcaatttgaaaaatgttataaaaggttgtttataaaaggaaaatgataccagataaaaatttgcatctaagcaaaggaaagaagagcaccagaaatggaaattatgtggataaatataaagattattcagtttttaatttttaaaacagaattgataatagaacaaaataatgtgctatgttaatatatgtagaagaaaacgtatgctaacagtagcacaagaaagtgaacaggaatgtaaaattaaatactgtgaggtttgtaaattatatctaaagtggcataatgtaatttgaaggcatattctaataagttaatggtttatatagtaaatcctagaggaaacagaagaataaaatgaaatatgtgtcacctactaagaatccactttataaagatacagataaagttgaaagaacggaaagatgacactagacactaatcaaaatccttgaaaaagtagtttagcacaaagggacatttaggacccccactcacaagactgcaaaagtttgagagatatatggagaatcatcttctaacaaaaagcaagctgaagactaggacaaaatctattcaaatatatatctaagataggacctataccgaaatatataaataattgttgataaaactcagtaataatgagacaaacaaaaagtgggcaagagtttttgacagatatttcaccaaagatgatatatgaatgacaagcacacacatgaaaagataatcaacatcaataaattattagaaaaattcaaattaaaactgcaatgatacacccctactcctgagtagaatggctaaaatgaaagactgaagatatgaagtatagagtatgtggagcaactggacctctcatacattgctagtgggagttcagaatggtatgttttggaaaatagtgtggcacatgcttacacaaatatatagttatcaaatgactcagagataccctttgagttatttgtccatgagaaaataaaataaatatcaacataagacagatataaatatttatagggacaggcaatgtagctcaagtctgtaatcccagtacgttgggaggccaaggcaggtggatcacttgaggtcaggagttcgagaccagcctagccaatatggtgaaaccctgtctctactaaaaatacagatggtgcacatctgtagtccaagctacgcaggaggctgaggcacgagaattgctagaacccaggaggctgaagttgtagtgagccgagatcacaccactgcactccagcctgggtgacagagcgtgactctgtccccctccccccaaaaaattatagaactttcccacactggaaacaaatcaagggtcctttaccagataaatgcataaacgaattgtgccatattcaaacaatggaatgcatttgagccatagaaaagaaagaactaatgttacatataacacatggataaatctcaaaagcattatgctaagtgaaaacagccaaaaacgaaaatactgaatgatttcatttctatgaaattctagaaaaggcaaaactagcgttagaagtcacttcagacattgcctgtgttgagagtgagacattatctacggtaggcatgagagaacattttgaatgaagggaatattctacatcttgatagtggtactggccacattgaattatttccttatatttgttgaatttttacttatatgtaaattccacttcaatcaagctgttaaaaataggaatgtgagaccaggcacagtggttcacgcttgtaatcccagcactttgggaggccaaggcgggcagatcacctgagatcaggagttcgagaccagtctggccaacatggcgaaaccctggcgaaaagctgtcgctactaaaaatacaaaaattagccaggcgtagtggcaggcgcctgtaatcccagctgcttgggaggctgaggcatgagaatcgcttgaacccgggaggcagaggttgcagtgaactgagatcatgaaatatagttactccagcttaggggatagagcaagactctgtctccaaaaaaaaaaaaaaaaaaaaaaaaagtaatgtggcttttctacaattttagcaaatatcagagttgactatcaaatcatatttttcctttcagcaagcatgattttgtgttgacagttgaatattttttctcttactctttcttaaaaatcgtggtttgcaagttgccattttatgagattttattacttatttttttaaattactgatattaaaatttagccaggttggaactctcttattgcctaaaactccagcttagctttagaaggtatttcaaaggtcattgccacttttcctgttaaatttgataggaataaaatgacaaccaatttatttcattttaattttcaggattttttcctgagttcagtcctattaatccttatgatcatgaccatattaggcttcatgactttatctttctaattctcatgactgtatttcctgtaacatttagagctaacatttattgaacacttactatgtggaaaactatcttaacaacatcatacatttacttcctttaattctcacagcacccctgtgaaggaagaataattatttttttactccattttatagatgatgaaactgagacacagcaacttccaaattcatataactaggaagtaaggaagcagagatttgcttttaagcagtcccactttacagcccattgtctgaactatcaaactacaaatcctataatttacagatcttaaattctagtttttagaagaatcaattcgcttaaatatgactctcagacctttccctctccctcgtgatggtttcaacatgagttttgcatcccctccaaaaactcatgttgaaatttagttggcattgtgaatggtattaagagatggagacattaaaaggtgagtaggccatgagaacactaacttcatacatggattaatgttattgtggaagtgggattatcatgagagtataatccgttataaaagcgagcttggccctttctgtctctcttatatgagtgctctcttgctcttctgccttccaccatgggtagatgcagcaagaagaccctcaccacatatgggcccctcactcttatgcttcccagcctccagaactgtaagaagcaaatctgttgttatttataaattacccagttttagatattctgttatagtagcacaaatggactaacacagtgggttcgagatgaatacaatcatctatattttagtaagcactcaggtcaccatcacatctggtttgttgaactcagtttgtaaaacctcattttgaacttcatctacaaggtatcagtgaccgtaagctaattttttactttctcggtgcctttgtctcctaggtctcaaaacggtgtggttcttttaagataaattgagatgacaactcctggcacaaagcacattttttatagtaagttagtttggttttgttgcttttggtggtagatattactgcaaaaaattagttgacagtggctactaataccatcttatatttcagtcagagtgaaagatattgcctaatatgcaaaaggtatttcaaagtgaaaagacatcttattgaatgtgaatccttttttttcaatctaattgttccaggaattacgatacattctcctccaatgcatgtttccaaaataccaatgagctcatttgtaattggcaaacaggaattttgtactagtataatgcagaagttgtgtagctttatatacaatttattctaggcaaagggaagcagaatagtcagcgtagaattataaccttgggtgggcaaagaagccctcagtttgaatgttgtatagtcagcaggagcccttttggctcagttttaagaaaactaaaaacaaaaacaaaaatgaatgcctgcatctggggcttcctcttcaaaggggcatgcccctggccttgtgcagctcttaaatatttgcagttgccctgaccctgtacccatttcaatggcaagcctactggcttggagtttgccttccaaccggatttcttccaccaattctggttaaagtgttgccagcatttatacccaattatttttttatgtaattctgagtcacttccttgagtggtccaaattattttctgaggtgccaatattatttttgctagcaatatactcccaaagttgcatatgttttgagtgaacttcctagaatcaatttttcccacaagttctattatttaggtgctgttttgttttgcattgtgaggattacaagttgcatatgtcttattatgaactaaacctcattttacgaacatgaacctctccaactctgtattaccttatagtttctgaaagttataatgtgttgaatggtttgcaaattgcaaaataacttacttcctcagagagattatttcatttctttgataccactagtgttgtatttgttttgtattaccccgctgtgtaaagcccacttgggttactatttttaaagcctgcaagacttctaacttacatttcctgtcttctatgctgcatcagcagaacatatacttttagttattggctctttcatctataaattactgcttcttagataaaagtacgtagtgatttaaagacctggaaacagtaggccaaagatgaccatttcttcactaaagaaagacattttctataaaaaatggttacgatttaataatttccatgattcattgtgtctatactaagtgtccaccactcatttttctaagacctttggttgcattattactaatttttatatttggtgtatataattgctctctgtatccattttctgagtgcaatcagtttcagaacaataatgcatggtacattagatgttttcttaaaagtttaccccttgtttatttaaagttcctgacatgctttaaccagaaatagaacatgctatgattatattaaaataattctatggatggaagcatcatcattcattctcactgagtatctgtttggacagtttttagaagcttgggattttaagttggacgtcataagcttgaataacagtgttattttcaaccattttaaaagacaggtttacaaactaaaatcatacattctttccccctttctagcttcatcattttagtcaattttttcagtgtctccaagtcatagctgttctttctataaagtgaagaaaataaatatgcctatactttgagtcattccaatgattaaatgtgataatgcataaaatgcttagctccataactgctttgtaatacattccacataagtgttagctttgaatgtttttataatcatgacttattaaatttgggaacaatgattactacatatttagtgccctgcttcctgtgtttactctattttcataacctaggcagctatggtccgatgaatgatttaactgctttagctagttgcactattgcatgattttagcctgatttcatgggatgcaacagaatgaacatcgtggctcatggctgtcagtagtgaaaaatagctggaaatcagacaaacaactttattgctgagattgtttccgggctaaaagttcttccaacagctgtttgttttggccattaacatgtccattctttttattttttctgagctgggggaaatacaattttctttaaaaagagaatgcaggctggctatttctgaaatcaggaagaacccctgtccttccactgttgtggtcttttggctgctctgacagttggactgaagggcttttccttttgattttttcctctttttcaatctcaaagttcagactcagactgctttagtgagaaaaaaaaataagcaaaactaagagctctttaatcctaagaaggagctttgtagcagttaccttgaagaagagtttactccccaaaggagtatttagtattacttagatactgagtcactgaacagagagagagagagagacagagagagagagagagagagagagacagagagagagagagagagagagaaagagagagagagagagaatgagaatgaatatgaatcccagccagcaagaaagaaaagatacttaactaaagatgcagggaagttttgcctcttcctgaaaattatattattagctttttaaaaatcaggatgactgctagttttgtttaaagtatttgttctggaaatactaaagttggagtctaccagactgaggttagaagcattttctttggcagcaagaagataattttatagaagccatgcctgttcttggggttgcctcaaaactgaggcagccagctgttgggtcaaagcctgtgcatactgctcttccgataccaaatcttggcactactgggtcacagcactgttcttcaagacctttggaacttactgaaacagagagctccatgctttcttgtcagcttgcgttaaaatcaacctgtgaatttggagagaagaaacccctccaaggaaaagccaaggagaaagaagacagcaaggttagttgctgaagttacctgcagacttgtgtagctaaaatgcacatttctctttaagtgcactataaaacatgttatgaaatggggagtagtagaggaataccagtgtaaggatgtaagtagttataatggctgaaaagctgaatatttagcttatgtaaacactgtattcttagtttagagttgtaaaagtcatgatcaaaattttctgaatatgcatctattgtaatcatttaatactacttattgatgaatgcctagttagttctagatattgctctattactaataatcataatcagtcacaaatgtgagaaaaagagaacctattgtcatccatactgcaatgtatgaaaataggtactttcaaaaagacatttatttgtaataattcatatagacaccatcacttttctctaaatgtcatttgcatttcaaagaatttctgcttgaaaatttgtatcataggctgcttaattcattgcagtatgaaggaaaatgacatactattttccttgatactgcacatttatatggactttcccttgtaaactgaaacgctactcttttacttattactgacatctttttcagtcatttaatttatgatattttgtgagtagttgctcatagcccttggtttctaaagcatactacaaccgttttctccagtcacgcatgctagaatggcactgaagctgctgaacttcatgcggattcatttgtaccttgataagcgtcacttttgttttgtgcatttttacttttattggtacatattaggtgtatatatttatgggtacatattggtgtatatatttatgtggttcatgagagattctgatacaggcatacaatgtgtaataatcatatcagggtaaatggagtatctgttgccttaagcatttatcatgtctttgtgttgcaaacattatatattcttttagttatttaaaaatatagaataagttattgttgacagtaatcatcctatagtgctatcaaatactagatcttattcattctatctaaatgtatttttgtactcattaacgatccacactccccctacccctcgccactaccctttccagcctctggtaaccatcattctactcagcatcactttttaatgcagcattaactatgatgtcaagctttccaaagtcacagcctcgtctctggcttcttaggaaatattttcattttactctgctatccaaatgttagtttaaaataatttaaggaaaaaacctttatacaaaaatcaactctagaagtgaaaaagaaagccactcctttttctacaatgcccatcccaccttcacctgttcagatcctttaagctttatcccagatccaactttattcataaagtctttgctagctatcccttccccaccattcctccttcccaattctttttctgtagaaatgcttgtgtattttaattatctggataatttcttttaattatctggataatttatttgtatctccactaagttgaaaacatatagaaggcaggtctcgtatcttatcctgtgttccagctctctccctgtacaatgctttatgcatgataagaattaaatagtagttggatgaatgaatacagcaattaatgaatcaatgaatgaataaatagttattccgagaaggattcagttaagtttgttcatcttttggaatcatttcgaaacaggaaatgtttccttgtccccctcacagggcatgtgacagcaggagtggcttacgtcttcaatgccccgctgctgaaacctctagagggatcatgcagatgggcagggtgtggagcttcgaccctacagcagcatctagggttgagtatttacagctcctgaagctccagtgggcgtgtgttacagtgtgttcttttagttttgcagtatgaaggtggcttgtgttaatcagctcagttagaccctctgccttattgcaagggcagagggctttctgtattctgggttctcgccttggttccggaaaaatcgagtcacatgtgggcttggaggatgagtgcaaggttcttttgaatgttggaagtacctctcagcagatggatggggagccataaggcggaaaggtgattttcctctggagttgggccgcccagcagccagactctcctctgacctccctggctagattcccctcgggtccatgtcgttctgcagtcgatggcctgccggtgtctgcaggtgcctgtcggtgtcctcttctgctggtgtgttcctttcgacgtccagccgcttatgtgttcctttcgacgtccagccgcttgtgtgttcttccgccagtgtgttcctctcgatgtccagccatttttgtctctgcctgctaaggtctcggggtttttataggcacagaatggggaggtggtgggccagggtggtcttagacaatgcaacatttgggcatgaaaacataaatgcctgtcctcactaggtccatgggcacaggcccaggggtggagccctagccagggaccccatctttctctacacagcacttccctgcccccttcctgtatcaattttatgtataaaacaaggggttgggaatggatgatttgtggagttctatgtctaacatagcattgtccatgtgagaaaaatcagttaaaataaaatattttttatgggtttatagttctcagttcaaagtgaacaattcagagtaaaaagcagggaaacataaattatcaacaaaatactaaaaatatttatctttttgcaaataattaaaagaaatgccataaaattccattctaatcttctgtgtatccacaagtctgtatggattcaatggcaagaatagagagagacactgtctctgctgaccatggctatcttttctgtaggtttagtgaaacttccactttgctaaatgaccttggcctaggatttgagcactataagcactgttttcaatataattttggttgatctctttggttagcaaacatattaatcaaacatctgatatcccaataagcctctgtggtaagcaaagttgtatttatagggatgttttcaccatgccacttatcagattaaaaatgttttcaaacaaatgtaaagaatgcctggtcagcagttcagaatatttctaaatgttaaaaagaagtatatgtagagttattttagcttttgggaaaaaaaaaaaaacccagaactgaagtaaatagcaaaatcgaacaaggtagttatattagagagaattagacttggctgcaaaagcagaaaagtcaacataacaatagcataaagaagatagacgtttatttcattttcatgtaaaggaaatctggagttgagcagtccatgtatggctggtagggagacttcaggaagttgtcagggaaccaggctctattttggttgccatcatcgatttgtggctcacacctcatagtcttgagtagataattgcactccacttaattaaaaagatacaccctgttttattaaatattcttccacactggcctcgttatagttccaaggccttaccttgctccaatggagactgaaaaatgtagtatttgttctaggcagccatgtgctcagctaagaattatgggttcaatttctaggaaaagatactattgatagtacccacaatagacgactgtcattaagaaacatttatgtggggtactctgctagtccttgtaccaaacagttttatgatctggtttgagagaacaaatttacatatgacagtgtcagaaatgtgtgttcagttgtcactcccttcacctgttgtttcaattagtgcaaatgccatcattccagtcatctaatcccgaattcctagactaatatctggtaaagtacatcaccatttcacatcccataacttgccagaagttgagaattttacttcagtattatagcttgggtttatcttcttctgcaattgctcatcctttgatggcctttaaagtttcctatcaattatttcagtgattccaaattggtatcgtctcctcctgtgtctctctacccacatccatgcagcatattcaccatcctgcttaagaagaaaactttatttgcttctcatatcttataatgtcttcattcaggcattcttgtctcccagttgtcactttctctatttccgtcatagctccatctagctgctacatcccagatgtcttcttcctgggtgtcccaatttcttcagaatgtttagtcccactgtcctttaacaaataaataatactagttccagactctatgtcatatgcagttggaaaatcctccacaatatttcaagggcttatgttttccttagctatatcttgttctgatttctttcttatctcaaattttctaatctctctcatatggatttgtttttccattcttcctgggcatacacccaaatgaagaacagagtcactttgccttggaacctttacttaacattctggaagttaaggttaagaaagagtgttctattttgtcacagctcagcaaacaacatccaattaagcattaaacatccctgttcatgaaagtttcttggccatacttactgtggagcacttcctggcttttacatctcaatccccagtctccttccaacttggtctgccacctttcttttactcctattttcatttccaacttctttccagtcttgggctcactcattccttccctctcagattacttgtgcaaactcaagattctgttttacattattatggaaagcaattattttttgtggacaagccttgtattttatagaaaattttttactttattcttaaaacatttcaaagaaagtattataatctacatttacagagaaataaacagagagagtaggagtcatacataggatcacacagttaactagtaacaaaatccaaaatttgaattaaagtttgttcaaaggaagacttttttctatgttattttatttatactttctcttaatgatgtaacagcaatattttttctgggtttaccctatcatccaaatcttacccactatttaagattatttcaaaggtcaaataaaagtatagacaaattggtgtggatgctataagggaggagagattacatccgcttggggcaatccaaagaaatttattcaaagagtagaggcgtttatgtccatggtagaatgtatgcttatttaattcctattcactctgctagttaagggcaaccatggtaagaattatttcttgctgttgtgttcacacagagctggcactaatgctttgaaaacagaaaatacacaaaaacagtagttaaaataaatatttaaaataagcataaataatattgtcatgcaaatgtattgtataaatagtattgctaatgtggacaattcttttgcagaatgttagggctgagagaaattgtatatgaatggagcattcagaaaagaccgaatttttgaaatttaatgagcagataggactcagatatatagagtaaaaacattcttttgaggaaaagttatgtaaacttttaaagtttaaactttaaactttaaaagtttacataacttttcctcaaaagggaagtaaacaactataaatgaagcataatatttatggaaaacagcaggtagacaatggagaaagatcttatgtaagaatgagaccaaatgacactggtaatgatatttaggagaaatcattgcagacaggtctaatattaaccaatggttagagaatggctgtatgtcaggtactgggccaaacacttcatagagtattccattcagtcctcacaatagccttatggcataggaattattattcttcccgttttacagatggagaaactgcagcttagagaggttaaattacttgccaatatctcaatgcgagaatgtggtagaatagagattcagactaaggctgtatggttacagaagacattattcttaaccaagaaactacactgcagcaataaatacttctttcggggttagggaaagggaaggaggactactgattgacttaattaatagtagggtttgttttaggtattaaattagcattgttggtgaattgtaaatcaatcagtggttgtgtgaagtgcctagaattatcaggagaagacaattaagttgacacatggtctctactgcattgtttgagtaacagaaataaataaaaggaaccccatgttagaaatatagcagcagatgtcaataaagtagatcactggctctggcctccagctgtttccttcttggagaagttgcctgattgctgaggactgtcaatgctcctgttggcttgctcacatggtagcatttccagagctggccaggcctacagctgcataggtcagctcttgggtccccagacgattctgcttttcttgcctgtttctgctgtgcttgcacatttagttatttgtatttaaagaaacatgattatttctttttctagttataactctccaggtttcacagttaaactgtcgtggtcattttaattgtttttgcttttgtggtaacaatggtcggagaatgttgaaataatgctggaattttaacattttctctactggcagaaggctcagcttttcattattgtacatttattgctcttgagtaacaattggtagaaatgtggccatcagtattattgtctattattttagttcatgctttacagtgtctttaaaggcttatatttcatgctttgaactggaaattattaaaattgttgatgctaattacatgattaaatgttgctgaaaatttcatacaactttttaatttttttgaaagtttcagtattttgtgtgtttttgatgccaatttgccgaacacattcttctcagtttctttttttcttgtgtcgtagacatctttctttcctttaataaaaactaagactctaaatatattgtttatagaaacataaagccaatagatatgtcattaattttcaggcaaaataattgctacgtgtttgatatttatgctatcaaatcaccaacaattatccatatccaattttgaacttgaaagattaagtggtataattaaaagaatattgtattaggagctcaaattttgaattaaacttatgctagatcctaaaagtgtaaatcatttaaactctctggacttcaatctctgtatttgttaaaaaatgaaatgaaatgaggataatagttgcttataaaacttttctaagagtaacatttttatctcctccctttctctttcttcctgattttgttccattagtgatcccatttctcatattgtcaatgtcttcatccccaatgcatcattggaccaagatgtttcagccttggcaccagcgacatttagaactgataactctgtattaggcatagggatagagtctgttatgagcagcgtaggatatttggcagcatgtctatctctatccaccatgtaccctccaggtttcacaattaaactgttatgtaccagtggcatcctttgtatttgagaaaggcaaaatcaaatacagttgagaaatgctgctttagaatcagcttccaataatgctttggtctttactaacttaaatcatagtaataacaacaacaataataattttcttcaccatatatcaattgctccatatttcctatttcacagagacatttcttgaaagcacagtttatgttcatggtcactgtcaagctttgcatttgcttcactttttttgatctctgacttttggaaaactctgacttttggaatactccaatatttactagcaaaatgactttggcaaggcagttaatacttaagtctcagtttcttcatctttaaaatgaggataatcatgtaaatgagcacagaatttttgtgaagattagaagagatattgcttataaactatatgtcaaaagagggcctaatacatagttggtggtcaacacttattacctactagtattataatattataaaagtatctgatactttcacataaaagtgcataaaattaataattggtagtggaatagaggaagcagtgattaattctctatagatgggaaaagtaacatttcaaccaggtcttgaaggttaagcatggtggctcacacctgtaatcccagcactttgggaggccaaggaaagtggatcacctgaggtcaggagttcatctagaccagcctggccaacatggtgaaaacccatctctactaaaaatataaaaattagccaggcgtggtggcaagtgcttgccatctcagctactcaggaggctgaggtatgagaatcacttgaacccaggaggtggaggttgtagtgagccgagatcgcgccactgtactccagcctgggggatagagtaagaatctgtctaaaaaataaaaaaataaaaataaagaatgaatttgatttagtcaagtaaatatgggaaaaaagaacattttatatggaatagcatttaccaggctatgaaatagtgtgttgtgtttataaacctacaggttactcaccaatcttaggatgtaggatgcaaccaagagagatgaggcttattcaagtcagtgggaagatgggcattaaatgccattgtaaagagtttggacttactctgtacagaatggaagaagtatgctaaatgtcaaagtgacatgattaagttcatattttgaaagctgacaacaaaataaaatatataaagagccagtaaatgggtgggggacatttccaaaatacagatgaggagaatatgatggagcaaggttttcactaaagtaccaagctcaagagcaatggaagagggacaaatctagtaaaacaggctatagatgtttggattaagctattaatcatcagcaatccaaaaattctatatcttggaggataaatacattttcttcactcagaaatgtacagtttagttggaagtgataatttgtgtgaactgggtagcaagtagtagttaaaattaaggattattactaacactttttgagtgcctcccacatgctggaagttatacccaagctataactctggtcaaacagccgtagcaactgatctcagagagatgctagggcagagctggaattccaacctaggtctatttgacttccctgtccttactctctgagtctccctctctgatgtttcctcacaacaatgtatagacaatcagcagtcaaaatcaatgttattctttactgtctttgtggatactgagtcacataataagaaaacaaagaaaataataaattcttaccaggagcactgaattaatctttgacaaatttcactttggactcttctgtctctgcaaatcccactgttacttcatttttctgtaagaactgttttactttggattactagttactgggtccaatacagaaatttgatatctgtggtagagttcattaattggttacatggaggacctcccctctgcaaatcatagaattatttgttaaaatgtgttgcaattctgcctggaaaaaaagtcactagatgaaagagtcatgtaaaaatgtaacattttcccagtataacaacgtgatgccacctccataaacgaaaagcaaaaacaaataaataaaaactatgggctatctcttctttttgctgtattttgatattgtaagtaacttttctgtaaaactgaaaacctggagtgggcaggttcaaaatttttcataatgaaatgtgaccaagcaaattttatatgcaatcaaaatggcattgcactagttaaggtaatgctaacttctataacagataaaacctaggtctcagtggcttaacacaatagaaatttattctccacttttttaatgctctcatatagttaggggttaacaaactatgacccaaaggccaaatttggcctggtgcccagtttcctaaagtcaaatcttgttggaacacagccctgatgctggtttatgcatttcctgtggctgcttttatcctataatggcagagatgagtagtcacaatagagactatgtggcttgcaaagactaacatatatactaactggccatttatagaaaatggttgctgacacatatatatggtaacaaagaaactaggttccctccagtatatggtttcatcatctcacctctagccagccatcagtgaaagagagaaaatggaggattgcataagaggctgggaattccacatatcacttccactctatttcattggtcagaactcagtgagatgataatacctaatttcaagagagactaggaaatatcatgtatctgtgtacccagaaattacgggaaatagtttggtaaactattagccagcatatagttagctagaaactggctatttagtcagatgttcaagattaagcaaaaattcaccatttaaaaaatagtctaaggtgctcagattgtcaataagttgtccagaattacagggatatatcttttaaagcaaaacactgaataagagaagaaccataatgacactcaagttactaaataaagatcttgcagttaacccagcttttaaaagtagaccaggtccagatatacacaaataccatataaaaagctcactgtggtctgtttcccaccttaggatctttctagctatttttaatttcttctgttccaacctgctcatccagtctcacatcctgaaagcaggtctctctcttggtcctgcacccttgcttcaacttgcttcaatacctgttattagcattattttcttgctggacctggaaactctctgtcagagctgggaaccagaaaggccaagactgtgtacgatctgaattgtagaagagaagtttaacaaatcgggtgaagtcaagtatccagcaagaaggaggcattggcgggatactagatgatgccaaataggtgactgcattgttgtgtaaggaggtgtcctctctcttggcttggaggtattgtgaaacttctgtcagctcattgcaaagtggttccaagggtcaccgagtgggaatgtgtgaatggatcactggaaaactcagcatcaaaagaagaagctcatattacaatcctttcagaccatgataagcacatataaagaatattacaccgaacaatctctttttaaatgcaaggtgaatttctaaggtaatttgtctgtagatttagttgtggtataagactatttgtatccaggtttctccttctcttcagcagtgttcattgtttagcttcagcttggatcaagttaaattgctcactttttaggcttaaaaaatgtacagattatatatttctctttattgtccctgaatgctcacatctttcatataaacttgctgtaccttttttttggacaatttattgaatttctacagggtgatatttttgccagaactttttatgttattattttgactcatatattatttggattctgtttcacatttcttttctcctcaaagcacctgctttttatactatttcttccttcctttggctggctttttgatatccacacttgtgtgttgccttcctccattgaatacaaggtttactattatctccaacaatatgttctctcagctattgtcttctgattccagctagacctattgtattacaaaaaaaaagactatttcggtaaatgtaaaccctttcagttaccacttccaggtctgcactgtggaccccaggtaactttccttgtttttgttaatcatttgtgtgtgtgtgtgtgtgtgtgtttgtgtgtgtatcttataggcattatagaaaatatacttagaaaaacagattgaatatagattcctaaaaagaacctggggttctttgaatattaaattcctattttttttttttaggaatctatagtcattttaggtgtctttttaggttctttttaggaatctatattcattttttcaatattaaattcctattcaatattacctagaagccacagaaatgattataatgcagattttaaacaatcatagcttttactgtaggtctggatgtaattgttttatttagaacaggtttgccgtctctaattgtgacgatcaaaaatatatccagacaatgccaatgccaaacatctcacaaagggcggggggcattgccccagtttacaaccaatttagaccctgtcttgtttaaaaaaaaaaaagatttagtagaattaaaaacatacaaaatatataaaatttcaaaacatatgcaaataaaatgggattatatgaagaaaagaacactagaaaaggataaagctagaggaaaggccgatacataaaatttttgctgtgcaattctgtacagtggctaggggtcgtccacacatttggatctgagctgttgagctgttaagattaagtgagtaatgttgctttaatcagtgcatttgtgctgctatgacaaaatactacagactgggtaatttatgaacaacagaaatttatttcttacagttctggagcctgggatgtctaagatcgaggtgacggcaggtttggtgtctggtaagggctaactctgcttccaaaatggcacattgtttctgcatcgtccacaggggagggatgccatgtcttcacacagcagaaggccaaaagagaatgaacccactctttcaagcccttttataggggccttattcccatctatgagggctccatcctcatgacttaatcatcatttaaaggcccaacctgtaaagctatcacattggtgattaagtttcaacatatgaatttgaaggtcacattcagaccatagcaatgcccaaagcatgagctaatatttggtcaggagagtcacaactttacttgcttctaggtgtgcaataaatttttttgagttgtgtttatagggataatacaatgtagtttaaataaaaaatttctcactaacatttttattccagattttaattattattttctccccttatccctccattctatatggacttgttttaaatttttattttaatggttctattaaatattttttcgttgggcagaaagaatatagtcatatacatatacctacatatgatacatgggcatacttattcatcctgtagtctaaatatgtagagtatatgttgcatacagcattacagcagcagtagttaatatgaaatcactaaacttctagtcaggtggcctgaattggagtcctttactccaactgtgtcatcttgcatgtttttactcaattttctcgactttgggattaggacaagaatagcaacctcacttaattgtagccagaaataaaagcgtactgttatagcatcataataacgttaagacattacctatcatttttggaagcaaatgagacctacaaacacacaatttttagcacaggctattctttttttagaatatcaataagcatagaactaacgagaaaaatttacacacagttttgtataaatatgtatatgtgtgtatatatatatatgatattcaatagctcctggatccatctattttaataaaaggaatcttgtggaatacaaatacacttcccaaattcaggcagtcttgttttgaagaaaaacaatcttagtagtgatttatgggatagagctcagatgggtttgtgcttagattggggctcagtgcagtctggcactgcctttagaagagaggaccatgtgctcttggactttgactaagaacctataacatcctaatattgaatgactttatttcagatttttgctacaacacttaaaagaacccaagtactttatttattttattgcagaaagaagcatatctacaaatcatcacgctttacttcaccattgttgaatgttttttcctcctatgtttaagtcaattaaaaaaccaatgtggaatagacagaaattttctcatctattgaagttttggatattagtgatatcttttagaggttttctattttttcatattttcattaagtttgattaggctaatactttttttttttttttttttgagatggagtttcactcttgttgcccagactggagtgcaatgtcacgatcttggctccctgcaacatccgcctcctgggttcaagtgattctcctgcctcagcctcccaagtagcggggattacaggcacatgccaccatgcccagctaattttgtagttttagtagagacggggtgtctccatgttgctcaggctggtctcgaacccctgacatcaggtgatctgcccacctcaacctcccaaagtgctgggattacaggcttgagccactgggcctggctgattagtttaattctttaaacattaagtgtaccaaaatactagctttacaatgcagtgcactccaaaaagcacataaagattactgatctctgagtcatatctccaattccggatgaacgaagattggagaggaaagggataggcttatgtagctgagaaatgaattcactcaagagttgataagcaccaaaaccaaaaacacatccaatactaaatgacaaagtgtctgtaatttcagatcctcctccattaaaatctattaatagagattcagattttgtgtttattgctttaggtatgaactatctgagaatccactgtcaggagtttattctctaaaagttaattcattttgtgtttgcataatgaatgaatgcaatgtatttagaaatagtgaggataatatatgcaggaagataattctaatagaaaaatctcttgaaggataaatacgaaaatgttggaagaataaatgagttatcacataggctgaccaactgtactggttatcttcagactgtgctgattttagtgcgcagtgtcttgttttggagattcttcagtcccaggcaaactgggatgattggttactcgagttatgagtccaatttccttgattttctccttgatttcattctagttttctataatagtctaattattagttctaattttatagtagttggagatctcatatttatcaatttttaaatatattattgccttgttaaattaaggattcgttgttagatgctgtcaattatctatttcagatttaatgggaaatgtcctttctttaacaggaatttttcaaattagaagtagcttcttcagaggttttattcaaaggagaatgattttttttcaatgaggttcaaatatatacatttgctcttcatccctttttcctaccatttttaaccagtgttggcaatgaaaataatacactttccttttatgaaaaaagctttgatttgtcaataaaacaaacatgtcttagttccatgagttcatcatcaggaaatttccaacctaaatcttacgggccctgagttgaatataatgatatcttgaggtactgcagtgaatttgttttttctataccttcagagactacacacagatatcaagactttcttttcacttcaacagtatgcttctcctctgtaagacagacaggatgtggtctaggagaaagtccacactttaacaataggccattgacagaatgtgtggggagtacaaagaggaagagagcatctgtctacacccaaaattatcagaggcatttctgtgtgtgagaatcttcgatttcaaaaatatgtttttaaaggtcacccgttttccttctctgtttttattggatgaggaaaattgccttcaagataacaaaacattttaaattcaggggaggaattgcatcacattttgtctagttatcccaggcagaaaatgaattccctcaggcactaaacacattttctttagctcttatgtatgatctatgtgaatcaagctgagaaaatgaaaagggtgggaagatgaaatccaactgaaagcaacagggcagaggatccaacaggcaagaagtccttctaggaagaataaatggagagtgccccaggtgctgactttatctacaattaattctgtataacattttctcattcattctgcatgagcaaagatgctacacaaagtattacaaacaccactatttttctttctcttctgtagccttgatcaaatggtagttaaattttaattaaatttcatatttcaaggacttgcaagaaagtctctgatgtcttagccccgtgtttgttctctgcatgtgtagcttgttttagccttcagaggaaagttcccatatatagcactctatcacgatgttgacctgtatgaacatccagctggtgcagctgccaggaggctgaaaggagagttagaatgagttcctatgtctgtcttgtcttttactttcttcttttgaatgctgttgtgtaaaccttttgttcaaatgtcttgccacctggattctcttgtggatgtgttgctactctctccaaaagacttggcagagggtgcttcctgttgtacagcagacttttatttacagaacacctataaaaccacaacaagaatagtcagaatataaaagatggccttctaatgaacgtagtaaaacttcagagcacattctttagccaggagaaagtgctgcaaagatgtgatttaggatgagtaagacataagtcaaggtgtggatctttcagtttccactagaaaacaacacttggatttcctggcaatgtatttttgtaatgactgtggtttctttttgtaaactgtgtctcagacagggaggaagaatgaaccaactggattgtgtaactttataaatagaaacagccatgttaaaataacaagactgctctgggttaaggcaatgaattttgctactagctgtaaagctaggccactgaatgaatataagatccatcctgcagagtaacttctaaggcttgcccaaaaatgcttaatgggaaaaatctatgagaagtccttgctcccttctattgtattccaagtgttttactccaaataaatcaaaaccttttctctgctggatatagtcaagttggagacacacaggaactttatcctccactacaaatattgaataatgtgctcatatcatttttaatacagcacatagtttactaaactttggaacagtttatccatcctggcagtggcatacaggataaagagttaactgccttattatctgttgaacaagatatatgctacatttgccataggaactggaacactgaatgatttaaatttcatgattgctctttatttttggaggaagaaacccaggtgaaagcagagaaatctcctaatgaggattaaaaaaaatcaatattttcaatatgattccatgcaatttcatatgtacttgaaagagatatgtgctgtgtttaccagtcagtcaaagtttatagttcatagcttttgagtcttttgggaattactgcataatagtgatgttttcttttattttggtggctaatccttcatagacattgttggcaaactaatcttcctgagcatagccataatcttggcaatcattcaagcttcccccaatgtaattaaaattaaatttatttaaactctaattaaatttctttaaactttctttaatgagaaaccgatttgattcatgtttatatctcttgagcttcccaaacacaatgtgttgtatgtaatagtgatttaaacatatgtgttgaataaaaaataattatttttatgattgtattactttgactcatgatttacttcatgtctatatcgcaaaaagagccatcctagagactgttcatgatttattggatagaaatgccagctatgctatttctatgcaggttgagtatttataatccaaaaattcaaaatctgaaattctccaaaatctgaaactttttgggtgccaacatgacaccacacatggaaaattccatacctgatttcaggtgatgggttgtagtcaaaacacagtcaaaactttgtttcatgcacaaaattatttgctgaaaaaattacctttaggctaaacgtagagtgtatatgaaacataaatttcttgtttagacttagtttccatccccaagatacctcattatgtatatgcaaagattctaaaatctgaaaagaaaactcaaaattagaagcacttctggtcccaagaattttagataagaaatgctcaatctatatatcagtgatccaaagtccaaaccttaataattttggccttagcagagtatactaagtctaccttgagcgatgctaccccaatccaatggtggtcacgtgtgtctccaaacctatctcatcaaatatagacttttgaatgtggaagaaagagtggaggatcttctaagacaagtgtctcctttttgtacctgattaaaattaagactcggcagattgaagtgggttatctcaaagccatggcattttaaaaagtggctataaaattctacgcccgtgtcctaagcgtcccatttattgataattattgcttaggttactctaataaacctgcttagaaaaataaatatgtctttaacataaaattcaagactcataatattatggaaagccagccatagccttgtgctagaaaatcagtaaggaggtggaacatgtttgagtcatcctccaacacttacaagtgtttttggcattctttgatttccttgtcagaacgtaactagtgaaattcctctgttcaataacaatatccatactctattgccagggtaggtttatggatgttaatagagttttccttgtcaagggtgatgtatgatatggatcttcctctaagtaatcataagtccgttgcagtatagtaaatcagccaagtgcattgtaatttatatgttttacttacagggatttcagacaggatacttatcaaatgtacaagaaaatgtaactcagtattttctgtaacatattcttcttgctttctttcaaatctcctttcctgctgctggtggttgcaaaggaggttggtgatgatgggggaaacctaaattaagctattttcttttggtttgagaaagcctcattagagtaaaagattagtaaatttcaaggtcaaatttcttttcagcacctttttttccttttctatgaagtttctctctttctttctcatttttaaaatggcttcttcagatggatggatacagtgtgtgtagggaagcttttgtgtcctcagggtaatggcagatgaagggagaaaaaagtctctggttttcttgctactctttgggtccttgctggtctctgcagagttggccccatccagcctggtcactggacatgtgctgtgagacttgggctatgtggacaccctctgttggcaactattgctcatattctgcacctgtcctgatgccagctctcttagaatactagtcctcagagcattcctgcatagcaccactgggacacataagaacttttggattcatagacatcggatacgctgtctcaagccatatctacctaactgtgtcttatcatttttcctctgctgtggctattccatattggcaaggagcacccctgcattctgatccccccagctatcaaatgagaagtggggcacaaattctttcaaccttcaccctgctctttgacctatcttgaattttttttatgtaactgttaatcttgtgcctagtcccaagggtatggaggcaccagcttctttctcaggaattcaaattgtatcttatctttagaaataccccttctgaatccccttgcttccttactgctatttgaacctttatttaccctcactgtcacaggttctctgaaatatatcttgcaccctatgcattgtggttaatagtgccactgtatgctgtggtaaccaagattttgtatttgatagataaagaaaagttcttgaatttggaaaacacttttgtgctcaatgaaatctaacttttgagactattttgtcacaatgaacttaaaaatattttcaataatattaagcaatcaattatttgttacagactgaattctgtcttcttgtaataatgattgtcgttattttaatgattagggaaactttagatcaactaagaaacaggaacaaaaaatgctatgctattatctcaaaaatgcatactccttcctacttaagaataataaatttatatattatgatatggtaaaattcacaactaattgtatttttccctagaatgtttaaagcattatctaataccagcttcagtgtctatattactgtaacttcatgaaagactactaacaatactggctatcatttattaatattaagtagtacttgccagatgccgttagaggtgctttaaatgcattctcatttagtcttcgtgtgtactaccgttatcttcactttttagataaggagactaaagtataactagagctaagaaacatgagaaagacgacctagctactgcctattttgtaattcccatggactaagcttggagaagtaagaactattactacaatagcagaaattgaacaacagcttcatttaggaaatcacagcaaaagtataaataaaatgatgactcttaggaaataaaaagcagtttttgagagtagggatagatgtggcctgctcattataaagttcacgtgtggtaatggataactgattttcaaaataacagtttaaactctgaaaattctgttattctgactgggtgcagtggctcacgcctgcaatcccaacactttgggaggctaaggcagggggataacctgcagtcaggaatttgagaccagcctggccaacatggtgaaaccccatctctactaaaaatacaaaacttaaccgagcgtagtggcacatgtctgtaatcccagctacttgaaagggaggctgaggtggtagaattacttgaacccaggaggtggaggttgtagcgagctgagatcgcaccactgcactccagcctgggcaacagaacgagactccctctcataaataaataaataaataaataaataaataaataaataatgttatacttatgaagaataacaaaacatatgcattataagtttgtgaaaacggcctagtaaaatattttaaaattgttattgatgtataatagacacataccaataaagtacacataccataaatatgtttcatgaatttgtagaaaatgaacacatttttccagctagtagagaataggaaacagacatttacaattgctgtctgacatttacaattacaatttagattccttattctcgtagatttatattattccagtacgtgaattctcccacaatttattttttattctgcttttaatgtgggcatttggatagtttatagcttggggatttatgaataatgacactgtgaacattcctgcacatgtctttttgcgaacataagaagcgatgtctgttgggtagatccctaggggtgaaacttctaggtaataggcaagacatatactcagctttcatgagtacgattactgccaccatttctaaagtggttgtaccagattgctttcttactaacctgaatgcatcttcagttgctccacatctctgccctctggtatcaccattgttatgaggccacaggtccttagcattttctatgtagtgtgattttgttgtagttttaagcttccatacacttatgactgatggaattgattatcttttctgtatttaactggccatttggatatcttccgttgtgttcattcaggttttctgcttacttttctaataagtagtgagcctctttccttaatggtagatagaaattttttaaacattttctgcacatgagtcctttgtcaaatatgcatattgtgaatatcttttcccattccatgggttgtgttttccctcccttaataatgtcttttgggaaacataaattcttaattttagtgtaatccaatgtatcaatttttatcttgtttaagaaactctactgttcaaaaatttcaaaactattctatgcaaaaagcactatttgagatgaaaattgaatatgtgcaatacttctgatagcaacatttcaacatacacaataaaacaggcagaattggtcattgtacagaatagagataatcttatctctatttaaaaaaaagccacattttgtgtcagatgatttctgaatccagtaaaactcttaacgtatgcataccttttatagtcagtttggcagacttctaaaaatcaggagttaatatttcataaggtataaatttttcttatactgaggtgaaaattctctctctgttagttccacttattggttctagtttactaatatagtcttttgttcacttatctattcaacacatattatatgaatcctatgacttctaagtcttggaaaggtttcagggataattgaggaactcagaattgactttgggaagcagtctgttagcaggtgtacatttttagagctcatagtcataccagttggtaggaaaatgaaaaagcctcacctttttgtcctcttctttgagtaaaggctttcaactattccacacacaatatgaatttcagatgccttatcatcatggttattcgttttcagacatagcctaattagttactgatatatttaacattaagattaaaaattaatagaaagcaatagcctacatgatgtttcatcagcaatatggctccattagtttctagaactggaaggcagcctgtttctgttgattcagcttagagcagctctatcatatttttggcagtacctcataccatgttcacatactaaacttgaatttgaataaatctgcataaatcccctaaatcgtacttttatgattattatcaaacaagtgtcctccaactttttcagttaatttacgaatgtacaaaacttgctgatcattagaaaccttgttttccgagaacattttatgatataggactatgttttctttttgatgtaaaagtaactgaagaaggtaggaaataaagctatgtaatcatgataagccaattgtgtgtatgtgtgtatgtgtgtgtgtgtgtgtgtttgtgtgtgtgtgttaaaattattggaaataaatgtgccagaatatttgtggcacttatcctagaaaacaacatataatttcaaatcatttatgctaattccaagttcatttccttatcaatcatgccgcctctttctactatcttttctaaatctacaaatgagatcatataccgtctaaatattttaagtgtaagcatttattacttagaaatgctgactaacatctggccgggtgcagtggctcacgcctgtaatcccagcactttgggaggccgaggtgggtggaggcaggcagatcacgaggtcaggagattgagaccatcctggctaacacgatgaaaccccgtctctactaaaaatacaaaaaattagctgggcgtggtggcgggcgcctgtagtcccagctactcgggaggctgaggcaggagaatggcctgaacccaggaggcggagcttgcagtgagctgagatcgcgccactgccctccagcctgggtgacagagcgagactccatctccaaaaataaaaataaaaaatatatgctgactaacatccttttgcatgtgtcctaaagaattcaggtggagaatgatcttttaatcaacatttaaaaattataattgtctaaatatttatacagttatccaactgttcggtatagcctaaatttcaatatatttttgccaaaaatagtaaaataatcatcaaatattgtctgaaatcaaaattctaagcttttgttatttttttggcttcccacttaacattgttacaaaatgaaagaaggtcagtttgacagaatctattcttagtgaatctgtgatatccctaaagggtatcacaatatttttctattttctcaaaaggtctctgttcaatgacattgtgatatattataagaattctataatactttgcagctcctcccatcaaggtggggtacagaagtgtattcacatccatcttgaatctggactggccttggaatttactttgagcaatagaatgcagttgaagagacactgtgagaattctgagcccagactaaagaggcccagagctttcccacttgctgctcgtgggcactctatataaataagcatgagctagtccactggatattgagtgacaatcgatgcagggccctagccgacagctagctaatgccagatgtatgagtgagtcgttgactgccagcacattgcagatacgtgagtgagcccagccaaactcagaagaaggaactcctagctgaccttagcccaaattgtcaccctacagtatcatgagctaaaaagtcattgttgttttaattccttaaatttttggtggtgtattttatatagcaagtgctaactgatacagattcgtactgcattttcataataaatgctataatgtttatttccatgtaagtctgttattagaatttactgtttatataggctgtagagtattattatcttcacttcaatataatttttaagaaacgttctttattgtacatatgttgtggagagaagatgagcactatataactggtaattctttttaccaatggatatatataagagctttcatttcctgctgtttgttctgtttcaggagaagtaggacttgcagctcttggctgtctatgaagtagagtattattattatttgttcttgtgacatgtagctatctaagtcttagaataaataatgctttatgaaatgataatgacaaggtgaaaattaggaggaaatactgataacttgctcacaaattgtgcacattggctgttgggccccaaggagtgttttcttacacaggaggtccacccaagatttgtttcctatgttctaaggtgtaaaaacatacatgagaaatatgtatttatttgaataagactatatttggtttaactcaatctttgaatttaaaatcttacctccagaaataattttaaaatattatattttagaaaattttccagtggaaacaatgccacagagttttgaaatgatgtaattaaaaagtaaaataataaaataacattcttaatattaaattattttacaatggttgtgaatgcataacattaaaatgttaacttgaaaggaggaataatacagttaattatccacatttctaaacaatgtttgagtattatgaaatggctttttaaaaacatttttacccagacatttagaattatgcactttaaaatttgaatggtttcaattcaaaataagcagttatactttctgaaaataagctttccagatcttgagtggatctaaatttttagactttggacaacggaaggctaggaatgataaaatgctaattttttagatttcatttagcagtatcaaatatctaaaactattttatggctttgcattgaataaatctgttacttttaacatcaaatgcatttatttggctgatctaaaaaatgagacgctagtcaagggaaattcaaatctacatatttctgataaatttggaggggaattcaagcatgaaagttggaatccaactgttttacatgcaaattctagccctctcttttaatgagggagtacacttgaatatgttacttaatctctctgagctccagcttctttgtctctaaaatgaagatcataatatgaacttcctagagtttttataagagttagacatggcttttcagtgcctggaatagcatgcatctttaataaatgatagctatcatatattccaagattttggttttaatttttttgaaattatgtgataattgtaatttttctttggtgtttagtgttaacggttgcattgaataagaagtttgaatcttttaaattattaaaaaaatctcattaacttaggaaaagtagggtttttcctaactaaaataaaaatgtaatgaattccatttctttcaagtattcagcaacatttatattgataaatatttaaatattatcattttggttgctaacagttccttttgtctgaattttaaaccattatctgtaattatatatatatatgacattactttagtgtgaaaaaaagactttagaaaaagtttgccttgagcaatcttttcctcaaaagaattaatgatattttaatattcttgtaaaaaactaattaaatatccatatataaaataatgtctgaaaactagggatagtaaaaatatgcattatacagattaaaatgggtgaaaactgaacccccccaaacacatttatatttacaatgccatggaatttgttatgtttttatgacacagagttgatgagttttattgttttgtttgcatatttgttactggtatgtttgtaagggcacacattacatggataagaaggaaattcatttcgagtaccaaatgctatccatgcaatttgccaagaaaaaaatatactttttgcatttgagacaaaatacaatccatatttatttcatgagcttaggaattttaaggggtcacttctataggagagttccaagggagttaggaatctggcctgtgagttttacttttggcagtggcttctgaaataaaacacaatcgcttataatatttcaaaaagttatccatcatccacaatgtaaagtacaatatttaaaactctggagtatggcttgaaaaattcactgttcatgggaggtggaaaacatgaaaagaaaatgaaaatgggaaacagggggtttaagcggaattgggttccatgtggataaggaatttgactcaaaatacaaatgttccaggaaatgtttggtgaggactgtgtagttaattaagatttccagaagttcaacaatgcctcaggttctcaggaggtagaatgcatataaccaccaacttaaagttaatatctaagaccagctatttacatacaatagtttaatagagatttaccagaagaattggtgagaaaacagttctgttgaagatagattgggaactcacagccatattttattacactatctcattgtggtttttcacactgtgggaattggacttccagaactaggggagcctctccactttcattttagtctgaccacttttcttcagggaaggcaaaggttcacaaatcaagtttgttcatgttaaaccccaggaagagatttaaaaagaaaatcttgctacataagcatccacaatgtaaagtacaatattttatatgttatatccatataacaataactgttctaccaaaagcccaagccaaacaaaatctaacaaagtctcattaagtattcaactggatatgcagtgcttagcagagaagttgccttaaataattctgctatgatttcctactgagggagatgcaaagttctttaccctgacctaagttcataaaccttttgtgttgactgactggcattgcaggttggcaggatatttcttctaatttactttcactgcagttataaaaagtatagatcctcactcttatttttaaatgaacaagtgtatgtcattcacaataaaataatatcagtcagcccagcaaagaatgagaagtcagtttcacaagtaattgagatctcttttcagtcttttagagaggggagaataaaatttcagtgcaattgtaatttcctttaattcatgcaaatcttagcatattttatcatattcataaactttccttgggattcagttaattcctaagttgccaccttagatactatattgtaaggccctggaaactactactgtaaacgtgtttcagaaacaatctaacacataactcctactttaaaattattcagttttgtctaagagaaatatatagtcctttgagatatggcttttggcctccagggcaaaggttttatgacagtaattttttaggcttaaggaaatcagatgtggctttcttagaacaacagtgttttgggtgatgaaaagacgagttagtgggtgcagcgcaccagcatggcacatgtatatgtatgttactaacctgcacaatgtgcacatgtaccctaaaacttaaagtgtaataaaaaaaaaaatcaaagtgaaaaaaaaaaaatcaaagtcctttggagcccaattccttctttgtgaattatgtaatacatgcataggaatggaatcctagcatgagcagtaaaacaagcatttcccatgctttcaaatgcaaaaaaaaaaaaaaaaaaaaaagactaaattgataatctttttgctatatctttctaattttcaagaaattatttaaaatgataattttgccctgaatttgaaccctggcatgcctcataattctcattttttaattttctccttatcacaccatcacaattttgattatcttttgttccttagttccatcacaagttgcatcaacttctggtagtaagtaaagcacaattaaaatatttccctgtatgttaaaaagaatgtggtagctatatatgaactgataatgaaatagcctcaagatttattaagtggaaaaagcaaagggaagaatattgtaagtagcatgcttctacttttgtagccaaacgcgtaaaatatatatttgtatgtatgtgtgcacatatgcactatttatgcataaatcatctttggtaggatacataagaaaatgataacagtgattgtctccaggaaagaaaggacaactaagaaacttaaggatcaagggtagagatgggcttcctttacttttatatataatatatacatatatatacattttatgtttgtattttatttataattttatatgctatatgcacatatatacattatgtatacaaaagtgaagtatatatataaatatacaacacatatatattcactttctattgttttatattgtttaggctttttataatgtatattattaaaaattagcaaacctctattaaaatgttgctgaggtttaaataataactgttacacccttttcatatttgatttagaaatagccatctctaaagtagtgctacaccaaagcagatagtcataagtatccaaacaattaatgcttatatttatttttttatttttgctaaacaagattgctagataatatttcctttttgtttaatgttttctgggtatagatgcagatgtgaatgcctaaagtcagttttaaaattttaaatagagctctgcatgattttaaagccaaatgggcagggttgctggcagtttctcatatgattttgagtggcaatgaacgtagcattccagtaattcttaatcaagctcttttaattgtcctaaaagggaaataaaggacttgaggatcaaaactatccttcatagagtgggcagacttgatcaatttggcctgaattacttggctgtaccctacaatattcatatggtgtatgtctgtctgtggaaacatgcagaagagtcacttaaaagcataacattgcaaaattccattaattcctttctttatcacagagaaatttgtcccgagcattcatttgcttcagctgagagattcagcttgaagccataaccatgattgtctcctatgtagtagagaaaattagcacgtggttgcaaaatcatatagctctgtggtatttacatggttataattgattaaaatctttcccagattaaaaaaaggaaccgtgtatctttcttcttttttttcctatttgtacagatgattatatgcacccatctacatgaccctctcttgcttagccaaacttgaccagaagttttgtgagtttttgtctagtcttctctattatcatatggcatctgtcatgaagacactattttatgagttaaattaatgccatttatattctggtcaaatgctaagaaatctggaatggttgaactaataaaatcagcttatacatctctcttaagagcaaattatttaagcaatgtttcaacattgcaagtagactgtcatgttgtattgtgaaaaaatgaagcagagacagttaaataacaaatgaaatatgacctctgctgaattccctggacatttacaatctgctacataagcaataggatgcataatttagagttgctattaccttctgtccagatattcatgaaagcctatttggttttaaattgttggggctgggaagggggtagattattgaaaaaacagaaatcttaggggaggctataaagaaacttcctgaaatcttaagtaattttcatgaaggtttatttactattctatattttatcattttctatgtttagagtccacaattgtaaaaattaagctttcttttgagcaactagaagaatagtccctactccgcaatgctaaaatcaatgtgaatacatattaggtaggatttcaaccattttttcaattgatatagcttttttgtctaaaatacctttaaaataaatactatcgaaagtcaagaaggtattccacacacacatgaatatacttttctactttctcatttctgtcatgttttctaatttttccaatagataatattgtgatagttactttaaatcacaggcaaatgcagttctgagatttctacagatgtgggacacacattaaaatgaattttttttttttggtcatgggtctttgaagagtgctgaataatgtaatagtcctctaatttcatgttctatatcattaaaataatggtttttaatgtttttaagttaaatatatagaagagagcagttaatcagctaattcaagggaagtttggtgtgacgttttaattatctaaagtttaatgacaaagatgatgagctatcttgcctttcttgaatcagttctgcttgtcaacaagatgaatttgttttgagttttgtaatgacagaagagttttgggggaggtgaagggaaagttggaggatcatctataactgatgctgaatccactgcggccaggctgcagaatcagttgaataatttgaaagtgtttattttggcttgatgttttgttctgagatggaatgaaaggagaaaacgtttattaagttaataatcctttctgtaacccttcccagcaaggtctaatgggtgtgccaagcaaatgataacaaaaaattataaaaaagggagcatcattgttctctttctgtttgaatttatcaataaatgaaagcctgaagggaaagtatcatttcatcggtggtgatatgtgaccttcttcttaaaacattattttgattaaacaatagcttatctaatgtttccatattaatcaggcagaagtttcttggatgaagcaactgtttattttaggacctgaatagggaaaggatgaaggaggatactgtcatattcaattttggaaggtcatgtaagcttcatcttttttcactcatcttgaaaaaaaaatggaataaagtgttccatttcgttatttctatactattaaacactgctagttacattctgagttcccattcttcttggttaataaaaactttttgtccatgacttgatgaactgtatgcatatatttaaggaattttgatgtcttaaaaatctttgttaaattatttgcagctgctcagaccaatccaacaagtttatatttaaaatgaaagggctggggatgccaactgtccaaatattacagaaaggaaatgcaaagtgtaaacaaacaattctgccatagatatgcggatcagaatacatatttgtatgaaaaggttaatttttaacttatctcaagattgttacaataaaccgtctatatttgaaattgtagaagttcaagtcccttcagcagatgttaggcgaatattttctgactactagtttaactttacagaccaccagatatttttggtcacttagtatttccatctttatagtcactatttgatggacaaatttttgaagtcttcataattatttcagctattatttcctataatataaataaaaaaacaaataaaattctcctatattttcttgtaccataagtcattccacaggacatttttgcaagataattttaaaatttattggactgagtcttgacacatctaactgcaattttctctttgctatgatttcttgattcattgacagaaatgtttacggaattcatccagttagcaatatttctgtaatctctaagtccttttaagtgaagtttgaatttcttacaatgaaaaaaaaaatggaaatctatataaccacaaagaggcttgttttaaggctactctgagaataagataatcctttgaaaggtagggaaatctagagttaagacaaaaatagctacttaaagacagtttactcaaattattttcattctttgtttttataatagggttataaaatcagaaaatgaaagttatttgagggagtcatacagggcaatcaagttaatagtaagacatctccaatttctcaaacactatattttatctcagctgcaactgtaaaaatacaacttttatggcagagattataatataaatggggaaagactggtgcacagttttggtacatcacacacaataaaagcctaaacatgaagattcatttaaatcctgtgatcaggacacccccaatttggtttgtactttcaccattctatagcttcttccttcaccccttatttatattttctttctttttctttccattttcagtcttttcctgcattctgccaacttgtatttttcctaacctgtaagtccctcatcttctcagcagtagggcccaatgattcacaaatgcatttaactatgatagtaaaatttgttaaaacataccttgttatgatatggctttgggtgcatttcatgtcaaataattctgatttaaaccccctttaaaagtatcacatgtacactagcatatatccactgcaataatttccctggtgcaataggatgtagggccttgccttcccaatgtcaccctacatagtaaataaatatttatggagctttgatgcaaggaggcatagtttctgagatgactgagaagcaaagattatgtaaattcttgaggctaacttgactagaaatagacttctctcaggaatatattccaataaagtctctgctcaatttttaagcaaacttttttcctatttgaagtcccctctgtccatctaccatgcatcatattgcccagttaaaatttcctcatcataggtacattaatctgtagttctcctattaatttatttgttgtttttgttgtccttgttgttgttgttttttcctttaaagaatgtatgcttgatgagggaagaagtgttacctgccttgttctttttgattcttgatactagaatgtttggagtagtgtcttgcacaaagttaatagtcagtaaatacctattcaaataatgaattaatgagtgagctgacccagaagtatctccacaaaggtacagagcatttactcttctctaggattagcctcctggaattgggcatattttatgttttattctaatcacttatgggcattaaatgtaaccttgtaagatctatgagaaaagcatttgtattggcaataaatgaggaattcaggtaaaatataaatagtgggtgagggaatctaaggtatgtttattacgttagcttcatctgtaaaaatagatagttttactaaaatttattcattctacatttcagaactcttgtagtttatgtagatgtgtctgtatattattatacttttattttactttaaagcgagagaaaagactgatatgtgaaaggtttctattgaataagaaagaaaaacagatgatttcctttaccctcataatgtctataaggtaccacatatttcaagccctcttctaaacacacataatggaacttgtttttattgcctagtcatctgttattacaaatatattttcaaagggagaatttgaggttcttttaaactatagctgtctttgaaatataagaacatatcctcattaattaatgtttaacccctttgaaatctatgtggttactgctgtttgcagtaattaaaaaattaattttgtttgagttttctacttattataatttaagacaatattgttaagaataatatttagggtatttagacgttctaacataatgtatttaacaacaaacaaatgaacaaaatttctatataactccctataatataaaacaattcgttgcttctctctctctctctacatatatatatgcatatacacatatactacatatatatgcatatacacgtatatatgcgtgtgtgtgtgtgtgtggtcgttctaatttttttagtggctactctgaaacaaactttgccatttcctgtttttcctaagatttgtgattattttgaacatagtgggtaatcaacatacttttaaaaaaatgcatgacaaaagagcctgctgctcttataatgttacccattgacctcacattataagttttttttcaaccagccaccaaaacaatatgagatggcatttttccaatattagtttaccaaatatactttgcaaagagtaattaataaaatttctaagcacatagttcaaaagcagaaaataactttacaaaaagcaaaaatcccaatctacaacagaaaaataattcttgaatgcatctatactatttttaaatgattattcaaaattgataaaatataaatagtggtagaggaattgagtgggtgttcgaatattttctttttacattctattgaagaattgaaagtgaatacattagtcttaaggtttaatttgaatgagtttgaaagttcatacaatgttagtggatacaagaatgcagtttttaaaaagaacttactacatcacaaatgtgttaacttgagtgcctgctggctcatgtagactccagaggccccctggtctatgcagccgcagaggtaactttgatttgaatcagaagactcacatgatccagccaccaaacatttcctcctatcccacatcaagactaaaccaaacatttcctcctatcccacatcaagactaataaataagattttatagtttaattacaatcacacatgaattttaagaagtgacttgtgacaaatttactctgctaatgttacaagaagtgtgccctttgattaggatttaaaacctcatatgtttgaagcatgaatgaatggtatatcgtaactgtatattgttcttgtataacttcatgaataacttgaataacattcaaatggaaataaatcctcttatcatccaatcaaagcttagatctatagtcaaattcttccatgaaataacatgaaacatccaaccctaatgaaaataaatttttgaaaacctctcaaatatacttacatatacttactttcatctttaatgtaattagattcaggcttgtagaatattctagagtattagaatgaactgtgaaaggctccaagcatgacaaggaggccatctctagagttgtgacactaaacactttggtagacccaatggtgaataaaagctaaaacactcaagtaactagtctgagttactgtagttgatatgtttggctgtgtccttacccaaatctcatcttgaattgtagctttcataattcccatgtgttatgggagggacccggtgggagataattgaatcatgggggcagtttccaccatagtgttcttgtggttgttaataagtctcatgagatccgatggttttataagggagttccattttcgcttgctctcattctctctttcctgtcaccatctaagtcgtgcctttcgccttctgccatgattgtgaggcctccccagccacgtggaactgtgagtctattaaacctctttttctttataaattacccagtctcaggtatgtttttgttgttgttgttgttgttgttgtttgtttttgagacggagtctcgctctgtcacacaggctggagtgcagtggcgcgatctcagctcactgccagctccgcctcccaggttcatgccattctcctgcctcagcctcccaagtagctgggactacaagcgcccgccaccacgcccggctaatttttttgcatttttactagagacggggtttcactgtgttagccaggatggtctcgatctcctgaccttgtcatccaccagcctcggcctcccaaagtgctgggattacaggcgtgaaccaccgcacctggcctcaggtatgtctttatcagcagcatgagaacagactaatacagtagtatagcaaaaaattactttcattgtgttagagtggaccagaaagtaataatgtgaccctatgcctcaggctccaaaccgtgtacaaagtaagaaacctgcagttctggactgcactgacctagtagattgctgggcaagggcccctcaagtatggacaaatctgagtaaatcactagggaggattagaaagggaagtggacttacaccagatactgtcccacatctcaggcacatggtctgaattgtagatttggtggttctattataaaccaaagtggaagtgatcttagccaagtttgaatcattttcttccagtcaaaccttgctgtttgttctaacttcagctattaaaattaggaagaagttgagaatacaggagcagcttactaggcttcaagtgtgaagagaaataatcagggcatatgttcctgtatataaaaatgggccctcctaaaacaacaacaacaacaacaacaaaaacccttccatgaaacttggttaaataattgtatgagtgccttaaatgttacttaatatatattaatattgttaatataataacgtatgttattctattttatcttattttattttactttgaactaagaggaaaaaactgatgtgtgaaaagtttctcttgaataagaaagaaaaatagatgattccctttaatagatttgaaaactgtcattgcagaccagtgcaagccaaatgtattatggctcgcacctgcaatcccagcactttgggagtctgaggcaggtggatcacctgaggtcaggagttgcagaccagcctggccaacatggtgaaaccccatctctactaaaagtacaaaaataagcagggcatggtggcacacacctgtagtcccagctcctcaggtggctgaggcgggaggattgctagaacctgggaaatggaggttgcagtgagctgagattgggccactgcactccagcctgggtgacagagtgagactccatctcaaaaaaaaaaaaaaaagaaaaaaaaacttagaggctgggcatggtggctcactcctttaatcctagtactttgggaggccaaggcgagcggattgcctgagctcaggagttcgagaccagcctgggcaacacagtgaaaccccgtctctactaaaaatacaaaaaaattagctgggtgtagcagcatgcacctgtagtcccagctacttgggaggctgagacagaagaatcacttgaacctgggaggtggaggttgcagtgaaccgagatcgaggtaaaaaacaaacaaacaaacaaacaaacaaacaaacaaaactttagaatgctctgctctactagctgaggacgcgaggattaatatgggggaaacaaggtcaaatggaaagaaagctgggctataggcagggctgattcagttcttagatttacctcttagccctgtgacctaggatgaattgcctaacctaagccttgattccccaactattatgagggttcgatcaaataataatataaagttctcgagagatagtaagtaaatattctattgggggcaaggtttttgagtcattaataaatattaagtaaaaacaattttgaattgaaaaatgtgttatggaagtaataatttttacaaaacaaggcattcaatgcaatcaatcttattgcccactataattgcgcataatatatcattaagtaaatgaaaatttgtcttaatgcatatgaccctactcatgtcaactatttggaacatgacatgtctgttctcttctcaagaatttttggaaattccatttctgcagtttccttccattactcttaacctcgttaactcttactaacttccagacctcagttcaagctttactttctcagggccagcttccatgactccttgtccccacccccaattctagatccgtttcttttgctttatgctcacttgtaatatcatgttcctttcattcagagcccttattcaatttttaataatatatttattgttttaattatctgttgaatatctttcttctcctttagacaatatgctttatgcagagaaaacctggtttgacccactagtgtatttctaatgtgtaacacatacaaggcatgcaataactatgtcatgaatgaatgaattaatgcatgacgcatatgttcaattctgttttacctatcatttttgcattggattatgagataaacacatgctcttttgttgttactcaactcaaattttatgtctacaaaatttaccaaggaattatctaaatgttactgcaatataaaaatgcaaaagtagttgtataaaagtttctaataagccgggcgcggtggctcactcctgtaatcccagcacttagggaggctgaggctggtggatcatgaggccaagagatcgagaccatcctgggcaacatggtgaaaccccgtctcaactaaaaatacaaaaattacctcagtatgttggcgcgcgcctgtagtcccagctacttgggaggctgaggcaagagtattgcttgaaaccaggaggcagaggttgcattgagctgagatcatgccactacactccatcttggtaacagagtgagactccatctcaaaaaaaaaaaaaaaaagaaaagtttctaataattgctacatctctaaaatttcaagcaagaatatataggggacaaattggtatgctttaagagattgacgtatccagaataaagcctagaaaatttgaacattttgttttttattagttagacatttaggaatcgggataaaagagaaatactggggttaaaatgagattttaacaactcagaaaatcaattattcttgctgcttctgttacagatgctggagaatgtgtggatgagaatctaccacacactggggaaagaaaaggaagtgaacagagtgggaaaaagagacatgttcaaggagaattgggaagaggaagaaagacagtgggaaatctgactagaagaatctaatccatgaggatcatataaactgagaaagggggagggtttaaattgaattgtgaaaagcacaggttatttgcatgaaatccaagagcagtcatcatccacaacgtagaagcaaagtgaaagcctaagtaaacatttgttcattttaacaccaaggacttgttctatccttaaagttttcctggagacaacagggaggtaaagagattaaaaaattgtacacatgcatgcacaggcatgtacacactcacacgcaagacagagatacatgaagaatgaaataagcacatgaaagtaaccggcccatcataggaggcccacttatttcagctcttgaatctaagcatttacaagggaacatgtctgtgcttaactttactccctagtggcttatacttaatttaagaaagcaaaatttacatgaaatacattccaatagagatctaaaaggataaatttcatgtgagaaataacttctctaagtcagcatataagaagaagaaaaaaattagtaaaagattgcttttgaaattttctatttttaaaattttatttattatactttaagttctgggatacatgtgcagaatgtgcaggtttgttatataggtagacacgtgccataattatttgctgcacccatcaatccatcatctacattaggtatttctcttaatgttatccctcccctaatccccatcccccaacaggcccaggtgtgcaatgttcccctccctgtgtccatttgttctcattgttcaactctcacttatgagtgagaacatgcagtgtttggttttctgttcctgtgttagtttgctgagaatgatagtttctagctttatctatgtccctgcaaaggacatgaactcatccttttttatggctgcatagtattccatggtgtatatgtgccacattttctttgtccagtctatcattgatgggcatttgggttggttccaagtctttgctattgtgaacagtgctgcagtaaacatacatgtgcatgtgtctttatagtagattgattgataatccattgggtacgtacccagtaatggcattgctgggtcaaatggtatttctggttctagatccttgaggaattgccccactgtcttccacaatggttgaactaatttacactcccaccaacagtgtaaaagcattcttatttctccacatcctctccagcatctgtactttcctgactttttagtgaccgccattctaactggcatgagatggtatctaattgtggttttgatttgggtttctctaatgaccggtgatgatgagctttttttcatatgttcgtcggctgcacaaatgtcttcttttgagaagtgtctgttcatatacttcacccactttttgatggggttgtgttttttttcttgtaaatttgtttaagttctttgtaacaaatttacttgaaattttcttaaattaagaaccacacacatggtattcttgtatactatattaacttgcaacttattggtcaagtttcttctctagcatgggaacaggttgccatttctttaactgaacattgaaataaagtaggcttgtgtgtaagaccagctaatacggaaaaaaaaacattaatgtcatctaactccacttgaagtgctatgcttctgaaaaacaaaagcattcagagaaagaagggactggtataggtagtagttggtggaaatgcaagagttagaactaaaagtgaaccttgaagggttggtgtttggggaaggccatggtcttgggcaggagactttatgcttggggaagttctggttggagagtccaggatccaaggtctaggtttaggacagaaccactagttcatggcaatcccagggaatcaaggaaatgtctaagagaggcccaagtactgagaaaaatgcattaaggcttttggcatcacattattttatttaaatcatgtttaccaagattttaatatccctcctttgtgaacttttacatttcggaactctatatgactgttgctttgcttttaaccaatgaggagctgtttatttatgtcatttttttcatattctattgtgttgaataaatgcaatgtatgctctttagagaatttgaaaaatatagaaaaaagtttttacaaacctttatccctgatatggtttggctgtgtccccacccaaatctcatcttgattgtagctcccataatccccacatgtcatgggcgggaccccgcaggaggtaattgatcatggggtggggattttcccatgctattctcatgatagttagtaagtctcacgagatctgatggttttataaagggcatttcccaacacacatgctcttggctgccaccattatatttctttatttatatttatacactttattccttcttcaccttccaccatgattgtgaggcctctccagccatgtggaacttgagtcccttatacttctttttctaaataaattaccccatcttgggtatttcttcatagcagtatgaaaatggattaatacaatacccatttctcagatttactttttagtatattagtatatgtatgtccagttttaatatatgtgaagataaacaattgatacagatcttattgttactttgtaacaaatgatgtaacaaatgtgacaaatcgttactttataatgaaatgatatttcttaaatatttttctatgtccacatatattttgatgaacttaatttttaatgattgaagttataaatcataatttgactattttaatacatttctaatatttagcatttctgttatatgtaactttttttgcagtttttataatgtcttagcaaaggactttactatttcttttcctagatgatttgcttgtctaaatatttcccctaaggaaaagaaatagtatttttatatatatacatgatttgtatgtgtatatatatatatatatatatatatatatacatgatttgcttatctaaatacatatgtgtgtgtgtatatatatatatatatatatatgtatataacagcatatgcattatgtgaaatttctagatatattgtgtcaatttgttttttcaagaacaatatgtaagaatgtgcatttctccataacctagcccaggggtccccaacccctgggccatggactggtaccggtctgtggcctgtttaggaaccagattgcacaaccagaggtgagcagcaggctagtgagttctagctcctgtcagatcagcagtggcattagattgtcataggagaatgaatcctattgtgaactgcgatgtgagggatctaggctgtgcactctttatgagaatttaaggcagaacagtttcttctcaaacccccacccaccctagtctgtgaaaaaattgtcttcagtgaaactggtccctggtgccaaaaaaagttggggactgctgacctagccaacactaggtgttggtattctttctatttatttttatttatttgtttattttgagatgagtctcactgtgttgcccaggttggagtgcagtgctgcaatcacggatcactgcagcatcaaccttgcaggctcaagcaatcctccagcctcagcctcccaagtagccaggactataggcacacaccaccatcctcagctaattttttttaaattttttatagagatgtgttgcccaggctggcttgaacttctgggctcaagcagtccttcctgcctcagcctctcaaagtactgggattacaggcatgattcagtatgctcagccagcattctttttaatctttgcaaatgagattcatagatttaaaaaaaatctaaacttacttgcattgctttattactagtaaacaatttcttgtggttagtaaaaaaaaaaatctaatttcactctatattgtcttattagtgaatgtgtgtaaagtgtaagaacagctcagaatgggtttatatattttaattaccactagggagcttttgtggaccaaatttcacaggtctgtgatgcactagattaccatctttcaaatgaggttaataataccatccttactatgttattataatgaatcaatgaattaagcatcagagacacctggatcaataaaatattattttattctgtattttttttatagatttgttactctgaagtttacatctttcatgaaacgtgtacagaagtatacattagaggaaatgaaataaagtggcacaactaatctatatttcattgtaggaagaatgcatttatttgagcttatgagtacaaaccaattaacaagattaaagttttgtgtggcaagacattaactgctatgagtagaagccaaatggaggtctttctgaacatttacttgcttttatgcaaaagaaaatattttaaaaatatttttattagaaaatatttttgagaaagtcctttaccttcaaacttccagcaagttataaatgtttaaattgttattctagaatacctcatatatggtgtcctcagggcctttgcacttattgtttttctacctaacattccttattcctaggtatccacaagggtcatccctgtatattatactgctttctgtctaatgacaactcttcaaaaaggtcttctcttaccacacttctcaaaagagcacctcctcacttcttactcattatcttgcttcaatgttctttattgtatttaatgctttataattatcaattaatttatcaattagaatattagttccgtgagaacaaggactttgtttcattcactactgtgttctcggttcctgaaatactgcctggcatatagaacacaaacaataaatatttgttaaattaatgaatttatgaatgtatgaatacattgagtcaagtaatgaggaaaacaattataatttgattatctaaagagatagcatttttattgtattcctgctcatatgatttatatatttaattgactgtatttagcctatgtgtaaatagaatgctaggttatacatttcaaatatattaacaataattagtctctaatgtgcttttatgtctccactcgtgttcttgtttaaatatgtaattaataagtagtctatactttctattcatgtgttcatctatcaataggcaatacttaagaggatccataatcatttcttccttgctcttgtagtctcctgaagaaaaatacagcattttcagggagtaactttgtggctcaggtcctcagcccttttccaaggcataggatagatagaatgacactgaaatttgttattgttcttatttccatctaaataccaaaataattaatgtaaatatgaaaataaagttgaaaatataattaatttatgcttctctcagtattttatagccatgattttatgtattacatcattatattgtatcataaatgattttatagtcgatcgttttggatatgaaatttacacctgatcaccaaagttgaagtgaacattccctccatatttgatgattatatgaactgggcattcattgtcttcccacttctccaatactgaaaagatgagagaaagctaatgtgcaataagacttctatatagctctaacttttgacagagtttaatgcactcaaggcacttgagcaggaatataggaagtaggaggaacaaggataataatttgagattgttcattaaatagatgaagaggctgtttcttcacgaatcagttctttttgctagtttcctaactgatttaaaaatagtttatcatggtagtcaatactgcatacacatgtgcatttaatttagttgacaggactctgtcactaagtatgatgaattgtatttgtaacatcatttagatgtaaagaggaaggtgcttttgcaattagtggaatctatagacagtagaaaaaccaaacccctatattttgaaacaaatgcttcattcatatttcctatgataaagtataagaaatattgatgatgtacaagccactttttgagtctttcagtttactgtgaaagttaaatttgctaatcaagcccagtcaaggctttttattaggatttaggattaaaatttggcttaagattgggctgcttactttaaatttttttctgctttttatgtttctaatgaaaagttatttttcctccctcagctctctgtcaaaatgagtgtgaattatcggtatatatttgaaagttatgagactggacacctttgtgctgttaattacagtacttaagaattgtcttaattttaagtgtaagaatcataccacaaaacattgtatatgttccttaaacatttacatcccttaaagctatgcagaaaattcactaacaattcttaggtaatattttaaagttacttattgtaaaaatcttgatttgctacattttaagttttacaagaaatgtcaaaatacattaggctgtaaaaagttcaaaaattccataaaaacaaaaaaagagaatatttcccatttgtttcttccctatcttgctgattccatctctacattggtgtaatctgagattttagtcccagttattttattattaaaataatagaagttttaaattaataatttcaatgggctttgcttaccagtatttctttcaactattttaatagatttatttttaaaatctaagatcaattctttaccaattatttctagtatgcttttctgtcagtatattttgagacctttcatgtcaaaaattcattttatattgcatttataggtaacaaatagcttgactggatataaaaaagtaggtttatagatatttttctcagagctttgttggcaacacttctggagcaaaaaagtggactatctaaatagaagcaagaaactggctggtgtcaagtttcccattaggaaataaataaatggggataatagaccaatcccccatgcataagaattccaaataagtgatgaaaattctccacctgaaggaggggagcataataactccctactccttaagtgtgggctatacatagagactgtcttccgaagcgtgcagtatcatattggaagtgactgtggtgtgggggtgggaaggaggagggagaggcgaaaaataactttacagtggagaaacttgacaaacactgtgccagccaggtaaacaagatcaatatcatcatttggatagtatttacctctaatatgatgtgaggaaagacactttatctctggtctttttcccaaaagcttataaccccagtaaaatcatgagaaaagtatgaggcaaattccaataaatgagcattctacaaaatatctaaccaatgctccccaaagctgtcaaggtcatcaaaaacaaggggagtctaagaaactggtaggaaaaagagcctaaggggatatgccaactaaatgtaatgtggtacctgaatgagaacatgggaagagaaaggacatgaggtaaaaatctcaggaaatctgaatgagatacggaattagttagtaattttgtttttgttttgttttgtttttttgagatggtgtcttgctctgttgcccaggctggagtgcactggcagatctcagttcactgcaacctccacctccctggttcaagcaattttacagcctcagcctcccaagtagctaggattacaggcatgtgccaccatgcctggctaattttgggggtatttttagtagagacagggtttcaccatgttggtcaggcttgtttcaaactcctgacctcaactgatctgcccatctcggcctcccaaagtgctggggttacaggcgtgaaccaccacacccagccagtaatgtattaacatcagtattaactataatatacacaccatagttacataagatagatatgtaataatagaagacactgggtactgagcatatggaaactgtattatcttctcaatcttttgtaatgcttaaacttctaaaaaaaaaaaaaacaaggtctttttttaaagaaagttaatgtgatctgattgtgaagtctctggtgccaggtgagcttagacatgttgattacatttgctccattttaattctatcatttttttttttagcgttcccatcgtatttactctttcctcttgaaatagtctttggcagtgaaatttggacttgaattattttctcagaatagctgaaataaactaatcttcgtaccaacctcattacattccagtaagatgtttataggaaggagaaccaaatttgcaaatttttagttcccagttgagcatatttgtgtctgctgcctatacacactttgtcccagatggtcatttctttatttttactgacccttgcagaggagaagcagctctaaatatagggaacccacagtggaggtttgtagccctatgccaccaaatacagctgctgctgcaagaactatttatgagtaagggagagttgcgaacccgcttggatagctaccctgcaaatttcccaggctcaaaaatgtctcctgtacatctgcattgaaccatgcgattttagagcagcaagttgtttagtagatatataaataaactctttacacactacaagatttatgtacacagaatttatattaaatgggaattaaaatatttgatcaacagggctatataggctgaattatatcatgcatatgaaaattatttcaggctgggtgcagtgctcacacctgtattcctaagactttgggaggtccaggcaggtggatcacttgagcgcaggagttcgagaccagcctggcacatggccaacttggagaaatcctgtctctactaaaaatataaaaattagctgggtgtggtggtggacacctataatcccagctactcaggaggctgaggcaagagaattgcttgaacctggggcggggaggtggaggttgcagtgagccaagatcgagccacttcactatagccttggcgaaagagcgaagtgaaactccatctcaaaaaaaaaaaaaaaaaaaaaaaggaaattatttcacagctataaaactatctacaagtactatttgttgttattagagttcactaccaccaaattaatctattttaatgttggctagctataacttttcaaaaagtgttatctcatgttaagccaaagtcatgttttctataattttgtagtacacagcaggtgataatgaagtcctagagatgtgcgttcaaatgcttgtgcttccaggacattggttaaatgacttaaattctctactctcattttccttattcatgcataatcctgataatccctgccttacaggaatgttgttagtgtgatcatatctgtaaaaatgtacctggcttcagtgtttaataattggcagtagtgatgattaatgagtttacctttcatgcttcaacaataggtgacaatgaataggggcccaagccttctcagcttccaaatggcatgtgataaaaatatatctgaacctccattttcaagtaataaagaagtcatgagtcgcacaattctgtttctcttattttatttttcatttggggaagataccagcaggaagcctgaggaagaaaacctttctttggcaaatagctgtcttttagtgaaatcacatcatataaaatgtgattttcaggaaaatggacaattttgttagcatacagtaacttcatagaggctctatttggggtagaagatggataaaacctgcaagtaagcagaaatcctttgaactactccatccagagcctcaatgttgtattgctcagactaatcactggacgccatcaggagataatgaaaagtgagtgacgccttctggagttatgtggttcattgatgctgtttccacctactctgccaattatgaccagagatattataattgcagtaaggtactgcacagtgatatttccatcaaagatatgccgcatatatgattgtggtaccataagattataatactgtactttatttttattgtgtcttttctacgttcagatatgtttggatacacaaagcttcccatgtataacaattgcctatgctatttagtcacatgctttacaggtttctaacataagaacgatagcacatgtcacagagcctcggtgtgtagtgggctgttccatctagatttgtgtaactacactctatgatgttcacaaaatgatgaaatcacctaagaaggcgtttcttagaacatagccccatcatgaagtgacacattgctttatctttatatttcatttatttatttatttttgaattgaggtcttgctattgctacattgcccaggctagaaggcacagctattcacaagaaccatcatagtgcattacagcctcaaactcctcagtctcctgagtagctagcccagcatgactgtgtctgtaaggcagaatgcctagatatgtgtactttcttctttcctgtcacctttcctttacttagtggatctcaaacttgagtgtgcatgatataagaatttattatggatataacactttttagtggaatttttactgtaatgtcttagaccttaggaactgttttaagattggtctgtctctctagcccactctaatacttggctttctgtatttagaggtgaaatcctaggtcactatagtgtttgcaaatggccagtagctcagctgaacttttccttgaactgtatatcaggatcagatttgataatctctcagcattcatagaaaataacagtcaaccttttacagctttcccactgtgtcaccaaaattattttaaattatacttggttaaaaagctattcttcttgaaaactggaacaagacaaggatgcccactctcaccactcctattcagcatattattggaagtcctagtcagagcaattagtgaacagaaagaaataacaggcattcaaataggaaaataagtcaaactgtctttcttccctgacgataagattttctacctagaaaaccctaagactcttccaaaagactcctagaactggtaagtgactttagtaaagttcaggatagaaagtcaatgtacaaaaatcagtagcatttctatacaccaatagcatccaggcagagagtcaaatcaagcacacaatgccacttacaatagctgtaaagaaaatgaaatacctaagaatacagctaaccaaggtggtgaacgacttctacaaggataactacaaaacactgctgaaagaaatcagagatgacacaaataattgggaaaagattccatgctcatggattggaagaatcaataatgttaagctggccatactgcccaaagcattttaaagatgcaatgctattcctatcagactacgaatggaatttttcatagaattagaaaacaaactattctaaaattcacatggaacaaaaaagtgtccggacagccaaagcgatctcacacgaaaagaacaaagcagaaggcatcacactacatgacttcaaactacactctatggatacagtaaccaaaacagcatgatactggtacaataccagttgacaaatagagcaatgcaacataatagaaaactcagaaataatactgcatacctacaaccatgtgattatccacaaggctgacaaaaacaagcagtggggaaaggactctctatttcaataaatggtgctggggtaactggctagccatatgcagaagaatgaaacaggacctttacctttcaccatatacaaaaattaactcaaaatggattaacgacttaaatgtaaggccttaaactatacaaaccctacaagaaaacctaggaaatacccttcctgacatcaggctttataagaatttctggctaagtccccaaaagcaatcgcaataaaaacaaaaattgacaagttggacctaattaaactaaagaccttctgcacattgaaagaaactatcaacagagtaaacagacaaccttagagcataggagaaaatattcacaaactatgtattcaatgaagttctaatatttaaaatctataaggaatttaaacaattcaacaaacaaaaacaagtaactctattaaaaatgagcaaaggatgtgaacagatacttctcaaaataagacatacactcaaccaatgaacatatgaaaaaatgctcatcattgctcatcatcagagaaatgcaaatcaaaaaccctatgagacaccctttcacatcagtcagaatggctattattaaaaagtcaaaaaaccacaggtgctaggctagtgaggcagcagagaaaaggaaatgcttatacactgttggtaggaatgtaaattaggtcagcctctgtggaaagcagtttggagatttctcaaagaacttaaaacagagcaaccattttgacccagcaattctattgctggttatacactcaaaggaaaataaattattctaccaaaaagacacatgcactcataagttcatccccatgctgttcacaataggaaagacatagagggaacctaagaacacagaatgtccataaacagtggattggttaaagaaagtacaaatatacactgtggaatactatgctgctataaaaagaacaaaatcatgtcctttgcagcaacatgtatgcaactgaaggccattatcccaagcaaattaacacaagaatggaaaagcaaataccgcatgttctctctaactgagagctaaacgttgagcacacatggagataaccatgggaacaatagaccctgctagactactagataggttagacaaagaggagggcaagggctgaaaaaccacacattgggtactatgctcactacatgagtgatgggtccatacacaaacctcagcattatggaatatacacatgtaacaaacctgcacatgtactctctgtatctaaaataaaagttgaattttttgaaaagaaaaagccattttcttctaacgtatttactaaatgagagagagaaagagtatgggagtgagagagacagagtgaggtgagaacatgcatactaactagttatttcatgataaagagagttttttcctcttttatcttgaagatggtcttgttccattgggtttttgctatcaccagttgttactctattggtttttctgtttttcttttatctttcagtttaccacagggaaattggaagtcaggtgtccagatggaaatctttcctagaaaaaatgtgattgtattttcctgacattattttataaacaaggcatgaaatgaactgtatttggccacatgaaatatttgtttatattatcctgttataatttaaaataaagccaccaataacctctttgtgaggtatagcacccaactatagctttgataggtgtttcattcattcaagtaaaggaagaaaacctggctcctaagtcctgttagtttatttaataactggatgatctttagaacggtgcctagaagcagtgtcaattcttgaaaaatggttgtgttttagttgggattctccaaaaagaaccagtagaattgatggatggacggagggaaggagggagggaatgatggatggttggatggatagacagattagatgatgattgattgattgacagatagattgatagatagaaaagaggggatatatcctgggaattctctcatgcaaattatggagtctaaatcccacagtaggatgtctacaagctggaggctcaaagatactggtagtgtggctcagtccaagtccaaaggctccagaaccagggaagctgatggtgtagcttcagtctgaaactaaaggcctgagaatctggggtgccctgttgtaattccctggagcccaaaagctggagaacctggagttctggtgcccaatggcagaaaaagggtgtcccagctacagcacagagagagcaaatttacccttcctttgccttttgtgttctctcatccaaacaggatctcagctgttgggatgatgtccacttacattgatggcggatcttccttattcggtcccttaattcaaaaaccagtctctccagaaacatcttctcagacatacccagaaagaatgcttttaccagttctctaggtattccttaatccactcaacttaacacctaaaattccatcccaggtactcctgattatttcattgtttcagtaattctgatgttcaccgttaatttagtatcacttaagaggaaggaaaagaaagattgacaattccaaattattaatgaatttctcccattttcagaaatattatgaaaatatgtcttagagtaatttttgttaataatgatgtcaatgatggatggagcatttctggaatctcatctttattgttggaagagtctacattcatggaacacaacatctatcagggctagtatataatgtcaaactttatgttacttgctttaaggttaatcagtctcatcattttttaatcatttatcttgaaagcgaaattattcctatatgggttaagcaattaaaatgttaaactttttaggagttaataagtattttaatacactgaaatgtgattgagtgtctctatttatgtcacagagtcacagagatggaaacactcttaaaatgtaatgatctaattatatgaattattaatctgaagtctaaggaagctaaatagcttgccaaaggttgtactgctgctttttttctgctactagttttgtatatatgtctcttattttcagaaaaagataacgatagcagtttccaatagtaccttacgcagaataagtactcaataaatgcatgttggtttgttgcaataaacacccacataaaaataaaagttgtattggccatatatgaagtttctttgctttttacaggttgtatctgccctaaaggagtatttttgtgaatcaaaaattttaagaaaatgttctgatcttaaattggaagtgacttccagtattcttctaaatttctttacctatgcccatttccttctcttagtttctctgttgagtagttaatgatctgttaagatgcacttcaatacattagagtgtccacattcttaaaagaacattgcttgagcaaaataacccatttgaaatttgaattattcgctgtcttgctgcttaagatgagtttaaatacaaccggagacataccttcagttctaccattcttctcacctttcttgataatggtagtaactaaatctttctaataagaataattttatttaaataaatacaacctttttaggcaattcctcctctccattaaaagaaacataatttatctatttatttaagccaaacaacaaatcttcagttctccccttgtctacctctattaccactgccctagtgtcaattattatcatctctctctaaaggcaccttgttggtagtcgatagtctcaatccaggcttactgtctcctaaccaatctttcaactgctgcctgagaaatgtaaatctgaccattctgcacccatatgaatgctctctatagccgcagggttaagcactacatggcatataaaactaccatgacctggtcctgcattcaattacagcctcatttctccgctctagtaacattcaagggcttctctttatacagcctgctgtttagtggttaaattatttccctccagctcatttgaactcccatacattccccactgtcaccacaatgtatgtgtcagtctgtatgctaaacttaacatgctaaacagaatgtacatatgggtctaacatgttggaatctaaatccctcaaggataggggctatcttgtcttcatatatgttcaatagttgtagattatttcaatttaaaattatagcaaattggtcttgaatgtcacttaagcattttgttgtttccacccctggacaactcattgttgaactcatctttctcaaggatgtagatagagcccccatttttttcctgatattcttgcatttaactaccatagcttactgaataaaagcagctgaatttgatccatgtttaatgtcattttcttaatctttctggacttggatatgctttttagaaaaattctttttttcttacataaatatctagaacagtgcctatcaataaataatcattgagctgaaataagctataatattgtggttccaatcggatattggtttatacccctcgattttaatcatcatagtcaacttaaaatgcctttgtatgagatttttcaattgttttcatttaatgtagtgtggattccaagctatatgggaatggaacattcttttccaggttaatgggactttgacaacagtttttcatgttcactaaacaaacatgaattaggttccaggtataatgttagtagctaatgatacaaatattgaccttgcgttagagaagaacccattctggagaaatagaggaacctctcacagtggcttttcagcataggtgcatttaattaggaaattcagtgataggagctggtaagaaagggagagagtgagggtagacttaaagagaaaataatataaatgctatgaaaaaattctgcccaccattccatatagttttgctctttggtaatcatgagatggaagacttagatcccttagttggcttcaatttctacacaactatatagggttgaatccttaaaactacatatcttctgcttcagtgggaacttagaattttcaagggaaaattcaagtatgagtacttattgccttatgtggtaacttcaaaaccagtatccagggaaagatcgtgacaatatgattagggctggggttaagttttattgaaattcatatttatttttgtgattatgtgacacttgtttttctccactagattataaactacatgataacaaaggcaatatctactttgtttattcttatgtgattagcattttgcaaaagccccaagatttaatagaaaataaatatttgttggatgagtggagttattccacgttaatctcctttttccactttgagagacttatttagagagtgctaatacttttgtgaaatatttttagagttttaaactaattcaatatataaaaattaatttaaaagtaagtagtaaactgtaaaataactaaacctcatttcatccacaaaattcagtgaagcttataacaaggttttttaagatatgaaacattatccaacaaagcaataaaattgatgttatcagaaatttttaaatcatgttattgtaattatgcatttaattatttcagtttttagatatctaagagggaaaaaagagataatgggaatagatcgaatgttacagtggcaaacaataaagcgtatctaaagacacaaaagttgttgagttttttttttctggaatgaattccttaagtgctttctggtcatggttccttaaatgaggaatatgcggtaaaatatgatgattttaaccatgggtttgcaaaagatttaggaaggttatttaaatgtacattttaaacccatactctaactaaagtggttatcattgtatacaattatccaaataggccaagcatggtggctcatgcctgtaatcccaaggaggtagaggcagggggattacttgagaccaggagtttgagactcaactgagacccccatctctacaaagaaataaataaaaattagcctgacatagtagcatgtgactatagtcccagctactggggaggttgaagcaggaggattgttttggcctaggaggtcaagactgcagtgagccgcgatcatgtcactgcactccagcctggacagcacagcaagaccctgttttaaaaattaaccaattaaataattaaataatttctgcagtgagcttaatggctgattttgtttttgaaatactttatcttaatacagtaagacaaagtaatgaagagaagcataagttaatagcctcattaagttttgccctcaaatgttatgtcccaagtaagtctttgggttggagtcaattcctggttgaattatctaatatgtatccaaagatcctatagtttatgctgattaagaatgacctgtatgtattaagcattgtgtatgtgggatgtggaattggcatgagtcactgaatgttctaagtcttcaaatgtttttatctttgttttctcagagaggtgagtcatatgtgtgtgactgtggataggaccggtgttcttctgctcaataacatacatactcagggggaactccatcttgttctatataatatggacaagtgatttcttgaaaaaaattttaggacagatttggtcaattgagtgttttaatctcagaataacctcaatgccctccaaacctgcatctgctgggcccagcatgatggttagcatccaccttttgtgtggtgcaatggtttattttatgtgtcaacttgactggacaatggagtgccaagacttttggtcaaacattattttgggtgtgtatatgaaggcgtctggatgagattaacatttaaatcagtagactgaataaagcagattgccctccctattattggtgggcctcatccaatcaattgaagatccaagtaaaacaaaaatgctgattaagagggaactttacctgcctgactacttgagctgagacatcagtcttctgtcctgggactgcagcttgcaccatcagctctcctgcttctcatgctctcagacttggactggaactacaccaccatctttcctgagtctctagcttgctggctacagatcttgggccttttcagccttcataattagttctgtttctctcgcaaaccatgagtaatataggtagacatatctatggctgaaatactggacaattaatggaaatgtgactattttaactactctaagttaattcaataataactcagtaaatattattttactttgcaatgattcatgttatactgaactctataagttgttatgttgaacataaaataaagtactttatcattcatattcatgacttttctgtttaggattaatggtattaaatagttgaaacagttgttagtagagatgtaaattaattaataactttaggtttttctcaatatcactctgaagtacaatttatatgtatagtgtgaaagaagatactagttgaagactagcatattttagcataagaaaatatgtccaatggttatgatgttcttatgcatctggtatatttttcagggtatacatagatcagccgttataagtttgaactctgtataagtacatacagtagttatcattcttggcctatagctatctgaagtccaactggaataaccagtcaaaactgacaccaaaaccagtaggtgagggaaataacacaaaaaccagtaggtgagggaaacctaagaagctgaactgaattctcgaattatatcttatgttagtctcataaagctttattttataaattattcttataaacaaactataattcaaattgaatcaagtctcagttctcagttgatcactgcaaactccgctccacagctcaagcagtctttctacctcagcctcccaagtagctgagacgacaggtgcctgcctgtcactatgtctggctttttatttttatttttatttattttttgtatttttagtagagatggggtttcaccctgttgcccaggctggtctcaaactccttagctcaagcaatcccctcacctctgcctcccaaagtgctgggattacaggcatgaaccactgtaccagcctcagttgaattttttgatgaatgcatttcctgaggactctgctattagcaacatattttcatttctttaattgtaaatgaattatgaaataaatatgataaatacaatatttatatgttagcttgtatttgcttcctacatggttatcaatagttgtttccatgtctatttcttacctttctttaaaaatgtagtgagaacctctgtttttactttgatatttttacgattcttcatcgagtaaatgcctgctctatattgactcagaaaaatatccagaaattacaatataacaactataaaattagaatttaaagtatgtagatggcttcttacacaaagtagttacttcacaataagtattcattgaatatgtgtaaacatctcacacagctatctgtaaactctgcaggaaagctgcacgagttctcctgaaagtaaattcaagttacagcaacatctgaaatgcctataatgttgcagaaactagttcaaagagaggaatcatacacaatgttctaatatgataaatgatttcataatttagacaaaaggtaattctccaaagcagactgtgattagtcaaatattttccatcctttttttttaagtaagattatcccatttcataaataggactccctgttaatttagcattcatgatgaaatattagaagtttttcttggtattcctgtcttaaatgttgacaaataaaacaaactcaaataacaaaataatttaaattaaatataattttcccagtaatttaggtagggccttttgtatctatgctgtgatttaatatcaatttataaagataaatttataaagataaatacatttataaagataaatttataaagataatataatttaatataaatttataaagataaatttataaagataatataatttaatataaatttataaagattacttcaatactaactcagtaaatgtttctatggtgagcatctttttcatattatgttgaacccaaaatatcctcaaaagtgccttgtctttatatctctttgtttatatcttctgcagataaatatatgtagtctttttggacaggtggccatttcacttattctcaaatccagattttttttcagtacttttaaataacgttccagtcctattatttatgacttgatacatgtttttgaacagcaacaacctaagttaaagtgactttaaaaaatgtactcggtcatagaaatcacagacagggctaataacttaacaaacactgtttagtgaaactgaagcttagagagtttaaggacttgtacatgaccccaaagccagcagctgcagagacggctttaaagtcttgctttccagtgtaatgcttttctgtgttacactctgctgccttccagagaagaaccactcatcttaagtgctggctcccttgtccatttattttatcctacctggaaggtgtcattgaacccttcattctctcccttctttgccccaggaccaacagccttgcaggtgtggttcctcagccactggtctagtagaagcctgtggggagggaagtcatttctgtactctttgtcagtttcatgggtttagagaaattgacctacacagaaatttttcaaacttatttgacatggaacactttttataattatttttgtcagattctcatattgaaaagatactcacaggtaatctgtggaaataattcaaactgacattaaaatagaaagcaaatgcactcataaatttattaattgctgaaataaatgatcaaagattgacttatgtttattgtgcaataaagatgttgaagttgtaagacagggtccatgatatagttgtaatcattgagtagaaacattcaatgcaaaagtgaattggcaaatgttgtctatattttcttgctgatggaaaattatttatttgtgcattaggtgatcaccaagggtttcctcaaattcatagagggggcaagccctaaaattagaccatttgaattttttttttttttttagacagaatcttgctctgtcacccatactggagtgcagtggcatgatctcagctcactgcagtctccgcctcctgtgttcaagcaattctcctgcctcagcctcctgagtagctgggactacaggtgcatggcacaacacctggctaattttttgtatttttagtcaagatggggtttcacggtgttagccgggatggtctcaatctcctgaccttgtgatccacccaccttggcctctcaacgtgctgggattacaggcgtgagccactgcgcccggcccaactatctgaattttatttcagcatttccatttactggctgtagattttgagaaaattatttgaacctattaaacgtcatttccttgatctcaaaattataatgatgaggataaaatatacgcaaagtgcttagtgtggtacctggtaaaaagtgataaatttatgttggctattaaaagggaaaagaaaatagaagccataattgttggtgggtaactaattttgatattagttaagtgaagtagcattactataaattacgagtttcatgagattccttctgtgccattgagtgacacctgttaacatctcactggatgttaggtttctgaagaacatgggtttggatggactgaattagttataagaatttcctctatctctaattgtaggatttttacttgcatagcatgtaaaggatctttataaatataaaataggatgcaaagaaacaaaaaggaatcaaagaaggaaaatttgaatttttaacaacctcaggaatgaggtagataaccaactacagttacattatgctgtaaattttctaatcacaaagtttatagagggcacattctatcaaagcaaaccatttctttgaagtttactggtaagtcagtaacagtaactgaccaatatgctatgctgactaatatgaagttttttctcaagcataaaactgagagaagggattgagattgttaaacaaaagacacagttgaagcttataatactaatgtattgatattagagttgaaatgcatagaatatttatattgacattgtcatgtctgtatattgatacatggcatcttattaaaaatgaattgattaaaaagaaagtttattaatgaaaaaactcagatagccaaactaaaaaaaaaaaagaaaacttggggggattgtaattgtacgccagcttattctgactttcaaggatgagttttactcaaagacaaaaatcaagaatagtaagtagaattagttggcaagaataataccttactcgaatgaggctttggaacagtgactacagcaacttccatgtagaatttttccagtggtggttaaatcaaaggaaggcaagagccagagaaatatcttcaagttgctctaagaatttttgtttaattgttgatgttaaaactacaagtgtactacttatatattgctctcctctatcgagttacactaacttattccaagaaaactaaagcccaaagtgtattcattttcagcagaaaataccaaggatgacacaggacaagttatttttgcctttcagtgaggttaccttcctctaatttactccttgacccttacctggtttcctctttcaaatgcatagtttgatctactgaattccagaacttcagcttcctccttacctcctgacttccagaaactacagcagatggactttggtttgttgatgttggaactttgcccagcacttgcccagatcttttgccaattgactaacaagatagtgttgttgtcaccaccccccaccccagcatgacaattatgaacataacctagagagatttctatccccaaaataagattacaaataaagtttataacccaagataaaggttagagaaaatgtacatctgttattatagtctttaaatcttggtcaaagtgatatttcatgttaatataaacattttaataatttagatttgcaaaatgtaataatttagatttgcaaaataagccagaaatctggaattttatgtaaaagtttcgagtttaaaaaacaacaataagctacccataataacaacatgagagagaaacttgattaatagaaagaaccaaattatcgagatttgattactttaaccaaccctcactaggccaccagcaaaattagaaagaactagccagtagctaccacagaagttgcaaactcaaataaatgtctatgaagataagacaagatccctattttgaataagagtaaatgagtgaaaagcgctgagtagaagcaacagaatgtggtagggagagttgggtaactgaagagtacaggctctgtatgaaagggaaagctcccgctcattgctgacatgcaagaatgtggactcagtgtagacagatctcatttctcaaaataagccagaaacctggaattttatgtaaaagtttcaagtttaaaaaactggctaaaatctttttgaaacactgtgcttgccaaatacagcatctttggagagcttcatccagttcactactgtgctctagcagatattcctccggtatccctattttcttgacttcaaatgcccccatctgcagaggagtaacttattaaaatattagtaacttaaagcacattcaaaagagatgtgtgatgatgagatctgaaagaagaaagagagatagaaaaaggacaggagtgtttcttgaaaaaaaaaattctcacagattcacctaacatagactttgcattcctatgaccctactgacagaaatgcagatattcaatatgaatagagtaatcaacaaaggaagatagaaggtcaacagaaaattaattgctattctgtcaaaggacattttaattttaaaataggtttagaatgattgtgtgtgtgtgtgtgtgtgtgtgtgtgtttattttgtggggaggaggaaggtggagaatagcagattgtgggtgatataatttgtaaaacttgctggccagccatctcatggtaaacaagaaaggaaacattatttgagttttgggcatgcagcaagatataaaacttagaatctactctccaaataaaagctaagtgtgatgattagaacctgcctttttattatttttgctttgattttatgttaatattctcagtagttctctaattggaaacttttacccctgagctatgtataaaacatgctaagttttgtattttcttaaatatttaaaagtatctgcattaaatagttatcatgactgtttcaaatctgttttccttcaatgctaccccatcctctactaccacatatatgtaccctcttgttttttttttttttttaatcctgtctggaaacatttacccaaatgttcctttttaaacaaaatacacagatctgataaaaggtgtcatgtttcccagtccttttcaaagaactcatataaaagtataaattataatttataaccactgacagggggatctaattatattctagccttttatggccatttagactgccttttgatctcaatttccagtaaaaaaaaaaaaaaaaaaaaaaaagaggaactcttttatgctatttttaagacagtgaaaatcttttacaaaaatgagaaagtgccaatgttagaaaattaatgaattaaacaatatagtaaggatgtatttttaatttaatcacatctaataccactaaccacaatcattttcaagagacagatcgctactaccttatcctctggtttaattgtcaggccacagaattaacctaaagattaacagtgaactctgaagttcactgtaagtcgatatagtaagatagctcatgggtctgcctgcacatcataaccagtttcatagtgaaaatattaatgtaacaaaacaggataccacaaaaggatcccaaactagggctcttaattctgatcctctgttttccttagatgtgttttacattagagattcaaattcacagtattatatctcagactttgtcttaggtactagaaattgagaggtggataagaccaggtgttacaaagtcaaaaatttaaagagtattggcaggtaaatataaataattgatgtggaaaaaagtatagaatatgatccaacttggtctatatttgttccttcttaattttgacaaagacatgggggaatatggaaaaatatttctctactaaacaaatgaacataacaattgcattatgaatagcaaatggtctctgcctctatcagggatttacttagcagtgaaggtggctatggagaagtggagggaacacgcttcctctaaaggggtaactctcactcagctccagttgatggttgccaggtagaacttcaagctgctcaatgccagctgtcctaagtattttaggagagccaggaaacccaattttgatgtgaaacccttgctttttccatgtagactttaaactgtctgggccaaacagagcaaagctttaggtcatggcctgtgggaggtagatgaacagccacaaaagatctacatcagactcttcaatccctcacccttctgtacctccctgatcaaagtgtggtctgttgaccagaggcatgggcatcacctgagagcttgttaaaaatatcgaatctcagatcctgctccagacctggtgaaacacaatctgcatttgaacaagcccacacatgatttgtagtctcataatatatttgacaagcaccagtctaggaaggcatctagaggaagaaattgatttttctccaaagaccatgacttttaaatcttccctggtgattttctattgtgatttcccatgtccactgttgactatatcgtgaatacttggtccgttttggaaatcagcaaatcttaattctcatggaagtaaatctttggtacctgctaccagcagtttcagtaaatgattagtgcacactagcacacatatcacatgcctcctttcatgcgatagctttgaatattgactggcattttccatgtaatcctagaactctgaccccattctcttttgccctttcacctcatctctgctttttgatatttcctatatccatgaacaaagaggtcttttccttgccagaccttggttgtacttctgttggcttcagtttcaagtaacttcacagcagtttgaattgcaagctggtaagctgtcctaggcttcatacttatctggctcctgtggctccctctttgacttatttctccatgagttgtacctatagtctctattggccaatcctgggctcctattttgtcttttttttttttctttttcttttaggggtggggattgttggcagatgtttgtgggagtatatatctgtaatatgtctttattcattggcatgcttgctacccaaagcattgtgagaattgctaccacactaaagaagcctcaagagtgtgtatctttgtatttaccatggattctactcttgttaaatgcaacttccaatctcatagtcttttgtttcttcacagctctgcctccgagtggttggcctcccagctaaactcacgctggatgactttaggtcacaaggagttttccttttaagcacctatatttgtttgatgatttgctgcttttttattttcacttcatttgtttcttataaccattacagattatttttattcacattttatagaagaaaatgagatgattatggaaattaactacctagacgaatatcacacacacttgaacaaacactagatttttggcatttggtattttttatattatatcatgatttccgtcccaaccatcagaaagcctctaataatacatttgcatttcatttcgttttaaatatcatcgaacttgtcaaacattataagtttttatcacagacttaagtatatttaaaacatatttcaaattggcaaaaatgtagtatataatacatgatcctactatatttacaataagagaaaatgaataaattttggagtgaatatatagacgcaaacaaattgaaataaggtattgaacatttttcagaaaaaaataaacttgatgaagatgtaggccactttaatttaagtaaataattgaaagaattaaaaagtgttcgtattcattcagcaactattgattgtgtcccttcagtattattcactgttttaggcaaagtatgtgatcagtggaagatgataaacataggcctcctgacatcatgggttgaggaacacagataaaatcaacataatttcctgtcaaaatggttgtccgttctataagtaataatcattataattttctaaaacgtggacaaatatagatgagcttactatagctttcaagactttcaactctcactctaagaaatacatttcataagtctagagctgccatagtgattcctctgatggatctgagcagagtaaattgaaaaccttctggaaaggattcaccattatagatgtcaaagggcattcgtgattcatgaaaggatgtcaaaatgttaatattaacaggagtttggaagaagttgtttctaactattatggatgacttgaaggggctcatgacccaccatgggaagtaactgctgatgtggtaggaatagcaagagcaagagaactgaaatcagaagtggagcctgaagatatgactgacctgctgcaacctcatgataacacttgaacagatgaggagttgcttcttatggaggaacaaagaaagtggtttctattcttgagatagaatctacttttggtaaagatgctgtaaacattgttgaaatgacaaaaaggatttacagtattatataacttagttgataaagcagcagcagagtttgaaaggattgggtctaattttcaaagaagttctattgtgggtaaaatgctatccaacagcattgcatgctgcagagaactctttcatgaaagtcagttgatgcagcaaatttcactgtcatcttacttaaattgccacagtcaccccaatttcatcaaccaccaccctgatcaatcggcagctgttgaccttgagaaaagacttccaaccagcaagaagattacaattccctgaagcctcagatgattgttagcactgttaagcaataaggtatttgtaattaaggtatgcacattacatttttagacgtaatactcatgcacacttaatagactacagtatagtacaaacataacttttacatgaggtagaaaactaaaaattgtgtgacttgctttattgcactatttggtttaatgtagtgttctggaatggaacgtgcaatatctccaaggtgttcctgtatctaaataataaaatgaggcatattttacatgtccggaatttaaaagtttgtatgcctttttcaaaaaataaagcgttaattcactagctatgagaaacccatcatttaaccaacttaatatctattagtaatacatatttcttttttccttaatgcgctagcactttatttattaatcgttttaattttagattcaggaggtacatgtgcacgcttgttacatgggtatattgtgtgaggctgaggtttggggcaccaatgatcctgtcccccagacagtgagaatagtatccaacaggaaatttttcatctcttgcccctgtccctctctcctctctctagtggtcctcagtgtcattgttctcaatttttttttttttttttttgagttggagtctcactctttcgcccaggctggagtgcagtggcacgatctcggctcactgcaacctccgccttctgggttcacgccattctcctgcctcagcctcccgagtagctgggactacaggcgcccgccaccacgcccagctaattttttgtatttttagtagagacagggtttcaccatgttagccaggatggtctcgatctcctgacctcatgatctgcccgccttggcctcccaaagtgctgggattactggcatgagctaccacacctggcctgttctcatctttgtatccatgtgtactcagtgcttagctcccactcataaggaggacatgcagtctttttctgttcctgcattaattcacttaggataatggcctccagatgcatccatgttacaactaagtagatgatttcattattttttatggctgcatagtattccatggcgtgtgcacatgcacacgcgtatgtgtgtgtgtgtgtgtattatattttctttatccagtctaccatttatggtcttctaagttgattccatgtctgttattgtgaatagtgctgcgattaacatacaagagcatatgtcttttggttgaataatttatgttcctttggttatataaccagtaatgagattgctgggtcaaataaatggtagttctcttttaagttctttgagaaatctccaaactgctttccacggggtcacccaccaagagtgtataagcatttatattcttaccaagaatgtataagcattcccttttctctgcagccttgctagcatctgtagtttgttgactttttcataatagccattctggctggtttgagatggtatcttatagtggccttgatttacatttctctgatgattagtgaggtggaacattttttcatgtttgttggccccttgtatgtccattttgcgaagtatctgttcatgtcctttgccaactttttaatgaggttatttgttgtttgctttgattaagttccttacagattctggatattaggcctttgttggatgcacagtttgagaatattttctcccattttatagattgcgtatttactctattgatagtttcttctgctctgcagaagctctttagtttaagtaggtcccacttgtcaatttttgtttttgttgcaattgcttttgaggacttagtcataaattatttcccaaggccaatatcaaaaactgtatttcctaaattttcttctaggattcttagagtttgagttcttacaagtatatctttaatccaccttgagttgatttttgtatacggtgaaaggtaggcacaggtttcaggccaggtgtggtggctcacgcctggaatcccagcactttgagaggctgaggcgggtggatcacctgaggttacgagtttgagaccagcctggccaacatggtgaaaccccatcgctactaaaaatacaaaaattaaccaggcgtggtgacaggtgcctgtaatcccagccacttgggaggctgaggcacgagaatcacttgaacgcaggaggcagagattgcagtgaactgagatcgcaccaccgccagcctgggcaacagggtgagactctgtttcaaaaaaagaaaaaaagaaaagaaaggtaagggtccagtttcattcttcttcgtatggcccatggctgcctgttgataccagtctcagctgagctactttggctcctcaaagaggaggcatctcttcctcattagtttctgtttggagtccccaaatttgcttggatatgcagctctgagatgccccagtactgtttttccgggtaacatgttaggggtgacctttggatgtaacaatagttgtccaccatatgtatatgcttaatagtacttggggaagaagatataggaatttaataagtgattttctcaaaattgtctctacctttacctctgaaactagtgatatatatacataattttcatatctgacattaaattttaattataatatgttgtttgcaaaaattatctcctgaaactttagttgtcgagttattttattggtagtggaacatctcttaattatctctcttacttaatcatctgtaatcaggatgctactttgccggaaattggtttctagactcattgttttcactctgtgaattgttcagttccatcaaagcaggggtttgactggctgaccagccatttcatagaaagaactattttgttttttaatgttgtgtaaacagaccatgattttgaaactgagcctatgaaaaatacagtaaagagatacatcccatcaatacctaatttattgagagttttcagcatgaagtgttgttgaattttgtcaaaggccttttctgcatctattgagacaatcatgcggtttttgtcattggttctgtttatatgctggattaacccacagccaatatcatactgaatgggcaaaaactggaagcattccctttgaaaactggcacaagacagggatgccctctctcaccactcctattcaacatagtgttggaagttctggccagggcaatcaggcaggagaaggaaataaagggtattcaattaggaaaagaggaagtcaaattgtccctgtttgcagatgacatgattgtatatctagaaaaccccatcgtctcagcccaaaatctccttaagctgatagacaacttcagcaaaatctcaggatacaaaatcaatgtgcaaaaatcacaagcattcttatacaccaatagcagacaaacagagagccaaatcatgagtgaactcccattcacaattgcttcaaagagaataaaatacctaggaatccaactttcaagggatgtgaaggaactcttcaaggagaactataaaccactgcccaatgaaataaaagaggatacaaacaaatggaagcacattccatgctcatgggtaggaagaatcaatatcgtgaaaatggccatactgccccaggtaatttatagattcaatgccatccccatcaagctaccaatgactttcttcacagaattggaaaaaactactttaaagttcatatggaaccaaaacagagcccgcatcgccaagacaatcctaagccaaaagaacaaagctggaggcatcacgctacctgactacaaactatattacaaggctacagtaaccaaaacagcatggtactagtacaaaaacagagatatagaccaatggaacagaacagagccctcagaaataatgccgcatatctacaaccatctgatctttgacaaacctgtcaaaaacaagcaatggggaaaggattccctatttgataaatggtgccgggaaaactggctagccatatgtagaaagctgaaactggatcccttccttacaccttatacaaaaattaattcaagatggattaaagacttaaatgttagacctaaaaccataaaaactctagaagaaaacctaggcaacaccattcaggacataggcatggacaaggacttcatgtctaaaacaccaaaagcaatggcaacaaaagccaaaattgacaaatgggacctaattaaactaaagagcttctgcacagcaaaagaaactaccatcagagtgaaaaggcaacctacagaatgggagaaaatttttgcaacctactcatctgacaaagggctaatatctagaatctacaataaactcaaacaaatttacaagaaagaaacaaacaaccccatcaaaaagtgggtgaaggatatgaacaggcacttctcaaaagaagacatttatgcagccaaaagacacatgaaaaaatgctcatcatcactggccatcagagaaatgcaaatcaaaaccacaatgagataccatctcacaccacctagaatggcgatcattaaaaagtcaggaaacaacaggtgctggagaggatgtggagaaataggaacacttttacactgttggtgggactgtaaactagttcaaccattgtggaagtcagtgtggctattcctcagggatctagaactagaattaccatttgacccagccatcccattactgggtatatatccaaagattataaatcatgctgctataaagacacatgcacacatatgtttattgtggcactattcacaatagcacagacttggaaccaagccaaatgtccaacaatgatagactggattaagaaaatgtggcacatatacaccatggaatactatgcagccataaaaaatgatgagttcatgtcctttgtagggacatggatgaagctggaaaccatcattctcagcaaactatcgcaaggacaaaaaaccaaacaccgcatgttctcactcatagttgggaattgaacaatgagaacacatggacacaggaaggggaacatcacacactggggcctgtcatggggttggtggagggggagagataacattaggagatatacctaatgctaaatgacgagttaatgggtgcagcacaccaacatggcacatgtatacatatgtaacaaacctgcacgttgtgcacatgtaccctaaaacttaaagtataattttttaaaaaaaagaaaaatgtggtaaagattattccaaaaggtaggtggtcgtgaaaaccaagctaacagggaacagaaggacacagcagtatttattaaatttacttcagaactactgccagattcactttaattctatcctatcttattttggacttaagaccaaaagttgttttcatgactttttcattacacttatgtctactgtaatttttcttctatactttatctgtgtcagagttggtgtttgctttctgaagtgctggttgtaccatatggttgctttaatttgaggaagtatcttatttaaaaaaaaaaagtaagaaagcgatttgaaatgagtatgtattcaatgcagaaatcagttattctcatatttaatgctttgtgatagagaagtcagtatattctccccgtggtctccaaatgcatttgaattcatctcaaattatttcattgaaagttcaccttttgtcatacaaaaatggtaacaatgtcttcagggatctggggcttttctaataccaaaatcttggattttgagattcaagatgaatagatgtattaaaatttatagaattgctttgggggaaacacaaaatatattgcctctgtatttattactagcagtatttaagtgggaaaaatgctttttctttcctatgcattctttatatcatcagtgattcattttgtttgaaaggaattctctttagattttagatcattaccttaacttctctttatagggaaaaaattactataaaattttaaaaatagagaggatcttcaaaatacatgagtccagtgaccctcacttataggactgttgagaatccagagacttagtgtgatttgtctaagagtatgaatctttggtgccataacttactgtatttttttcctttttcacatttactttcaaatatattctgtttatgttttctttctacatattaagttacatatttatatcttctgtattttatgtctaaatttaatgcatttcttactcttggaagtttttggagtaaatgacaatacaacccacaatccaggaatagtatgtttagcttttgtaatagtaattatcttattgtttactaaaacgtgtattaaatatggctgaccagacccataacaatatgagcacaaaaattactacaataatttacttttgtacattgagtacagtggaaacattttgagctaactagaacatttagattgctgttaactactggacatgacatgatggcctgccaactcccatcactttcgtgagtaccgttcccacgatctactgggtagttaactgtcactagaccttgctccctctggtcacttctgattagacaaaaggtgaacttctgatctaagctataccaattccatttcttctccctgaaaattgtggagcatgcaggaaaggtagagagctataggcactggattgattaactcagatatataggagctgaatttgccgcaaacttgcaaagaaaaccaatttctgtacaatgagagaagaataaagcagggaaaagcagggttgaaatacattagagataaacacagacagacagacacacatccacacacagaaaggcagagagacagagagacaaagaaaaatgagagaaagcaaacaagcttttgttccccaatgctttccaattaatttccaattaacagcttattggaaagagccagcagatcgcccttaggaaagacgaacctctgaatctttataataaattccattttcacctaaattttctttgcatgagtttatgtttattgcaatcagtataaaaaacacactgcattttatatttgaatgatatattgagacaatcattaatactgccagtaaagaaaaaaaaatattggtggcaatggactaggttgagggattaggaaataatgtccaggtattttagcagactattaaaactccgactgagccacacaatctgagttcaaatctcagtggcaccagacactagttatgtgatttggacatgtttcttgatctcccttccttagtaaaatggaaataataatagtatccacattacagggatgttgtgataacttaatgatttaattcatataagagtttggatgaatgtctggcacatagtaaatctgtataagtgttaaatattgaactactaacatttatattgaccaggagtaaaactgctaaccctatataattttgaagaaaataaatattttacctatatgaaatacagttgccaacttctgtcattacttaatagttacatcttttgtttttcacttatttgccaccatcctggtctatctatatggcttcagtgcccttcaagcagccctcccagactccattatctctactttctaagaagctatgctgattgtcactcatccgtcaaaaactctaaaatctgatttcaaatctgacatcctttgtccagcttgaatttcctgtgtgacaggctcatgctagctactcaataaacaaaggtaaatcaaagtctcttacataatggagttccagggtggtggcgaaagccatgtgtgaaggaagagcgtgtacaagggcctagcatcaggagagatgatagctcattcaggtaacatgtatgtattcccaagtctgtgtctttgccaattttattcatctatgtggaaagccattgctttttgtctttctacaggttgaactttggttgaagtagtttctagttgcctccaggtgagagtttttggtaaccttctcatgtctcaagatcgagctcaatttcatctcttttataaaacttacccacttcagacttcctgattatttccttgtaataattagtaacaggtatcactagctatctctatcacatgaatggaaaaatgcatgaacacttttagggcagtgatgtgccatttcaaccaaacgttaactttagaataactaagtagcaatgtgtttgtggaaggagaaaagacttttatacaatcttcaatattgtatttatctgttttatatgtaggagtcctcataacaaccctatagaagaggtatcattacacctgatttttagttaagaaagctaagactccagtaccattttctaagactaaacacctaagagcaagctaatttgtcaatatattccacacatatgtgatactgagccggtgaacaggctcagtaaatgttaactcactgcactatttcttgtctacataacgttacatgtgtatcacatacttgtaaggatgtgtggatgtttatcaacttttctttctcagagtaaatggctgaataaaattgatgacatgcatattaaacacaaagtgattgccacagaatttccttccataatatttttgaaagctggaactaaaccactcccatgtagatactatagagttgtggtttacagtggtttttagcatatttactatattttattattttaaaacataatgagctgttgtatgtaagtagcaatcacaaattatacgtttatttgtcagcatgatgttccaaaacaacttatattcaaaactgtttattttcacatagactactaattacatattggaaaataaacataaatattaaactcactgtattgtaaatataatatgaagccaaaaacatatgcctcaagaaagtattggagctgacatatggtttataacttcttgtgggctaaatacattgtccttcactgaaaagcttggaagtcttttattcacttatttaaggaatataaaatggtttccaaatgggcatcacttaccaaaatgcacataaatgtgctttctagaaggagaaaaaacaatgatacaggtatttttaagataaggtaaagcaatttaaaaagaatatatccctgttattctttagcttccagtgtctagttttttatgattgtattgattttgttttatagtagtgtttgaattttgtactttttttcccaaaaatattactcatctaaaaagcacattgctttctttgataactggcttagagatcattaaaatatctgattaatgagtagatttttttcactgctttactattttcaatatgtcagagaaacattcaacccttctaagaaatttttctgctttgcataatttatagatcagattgttccttctctataataatggcacttaatttttgcctatgaaaatagattgtatagtttgtatttaaagaagttaaaagtctaagtagtgtaattaaaatcaagctatagatttcatagttcagtaaaagtaacatagatgtggaaatgggctgactggatccaaatcatgaccctttcatttgtcgtttcaccctgctcatgctacttaatttctctcagcctcagtttcttcatctgtacagtggggataataacgtttgctgatagttttgtggaaggattaaattagatactgaatataaagccccttatatatgtcctagatgttacaagtactcaaaatgtggctaccgtttttgctagattaacattattgggtataggattttataatagtttgataattaaagatgataattttttcaacaggaaataaaagtcactatctgtatcttaacatatgtagtagagaaactttcaggaacatttttcttctctgatcttactaaaacatcagttcaatttggggagagctttgtccatccgggtaacaactgttccaccctgatcaagggtgatcatagtgaatactgataggaagaagaagcataagaaataccaacttaaaatctttaattccaaaaaaaaagggaagaaagaaaagaaacagtatgttattagacaattgtggcactgcatgctggtaccacatggaaaaaaggcagattagcttgttatttatctttcaggtagaacaagttctttactaaaatattagctgatgcaacatacttttgtcttttaaaataagctactggatgaagttcagccacctttcaaatacattgcccattatcttataagatccaatggaaatagagaatttaatttatgactttcttgtataaatgcttcttcatggatgctttatataaaatataataatatcaatttttatgactattaaagattttattgaaatagactagcatcagagtctatagttagaacataaaatcttaatggtatcacaatttactttagacacacaaaatgaatgtctaaaaatgggtttcatataaatttttcatggtgggatagatattagagaactaagatatgtcattatatatatgcaatcacttaaatgcctttgttgttttcatgtttgagacatctttacaatgttcctaatatttcgatgttaagatttttaacagaatagcacgattttactctcaaggcatacttaaaatatgtctcatagggagtttaattagataggaaatttgggtattcttatgtctattatttcattttacattgttatgaagggttatttgagaccgggtaatttataaagaaaagaggtttattttggctcacagttctgtagactgtacaggaagcacagtgccagcatctgcttctgatgagcacctcaggaagcttccaatcatggtggaaggtgaagggggagcaggcaggtcacatgaggaaagagggagcaagagagagaggggaggaggtgtcagactgtttaaacaaccaattcttccttgaactaacagagttagaattcactgattaccatagggagggcaccaagccgttcagtagggatatgtccccgtgacccaaacacttcccattaggccctacttccagtattggagatcacatttcaacatgagatttggaggggacaaacacttatatttaatagattgctgaaaaggtatcattacttaaaaatgatcttttgcctatgtctaagtttaattttgacctgaacttcagcaattgactagtgtctgaccaccagaagcattcctgatctctgaggagctgcagttccagcaactcactctgtacctaagattggtgacaaagaaagcccaggcatccaaacaagtcagcccttgaggaaaaatagggctgaaagcacacaggctgcaccttatattctgtgttcaggagattcccctagagacagagaaataaggtacaccctaataggttggtggtgtgccaccaaagtcattttgcttgaaagctgaagcatgaaagaaaagaggtgaaacagtaacctaaaacatgaagatactgtgagatactgaagtagtatggacacttatcagtagagacaaacaacaatggacatgcagagggaaaactttttaaacttttgtatttgagagagaagtgaatggctatctttttatacctcaaccggccaggatggtactctacctgggaagtactgtgtttactatagagatcgtgtatgaatggaagaatgaatacccttaaggcagtgctgtgccatttcaacccaacattagctttagaataactaagtcacagtgtgtttggggagggagtaaagagccaactccaggtaaaaagtgatcaaatgcttctggactttttgataaaaggcagccagaaacagatgatctgtcctagtctttggaaattccagaattcccttaaagaactggattagaatctgccattaacaaaattaatctaacctgttggccagcataacatttttccaccaagtaaatttataatgcacttgatccaccatgccagaaatgttcaaggttttcaatctcaatcttatgtctgtgcttctgttaaaagatcaactaataagtacacataatggagtattttggtttattgtcaatgcaagaatcagaattgcatcctatgttggacttttcccacaatatcttggtaaatgatcatctactctatatgcaaaaacatcaattattctggcaatgcttctttaattttttaacttaaaaatacctacagatggatggagtgaaaaattactcataagagtttaccaaaactcagtcttctgaacttgaaaaaatgtattcgaaggatcaattatttatagtaccctatgtgaatttttcattttatgaccaaatgtgtttattttagtctaaaattaatgttttaaatcattgtcattaaactaattttcaagcaagttgagccacgctaattagaaatattcttataccactgatcatatattttttttaactccagggtgttcagaccccagtttcagaaacacagtctttattatcaaacagttctatgtttaaatcaagcctttacctcacatttgctgtgtcattctggaaaagtagcttaaccttagcaagatttgtttttcaccaagttaaaaaggaatgatacctactgcattgagtttatggcaagcattccttgaggcaaggtaatgtaaatttcctggcatataatactgtttggggtggaattgtgcctaccaaaaaagatgtgttgaaattctaactccatcaccacctgtgaatgtgaccttatttggaaatgggtctttgcaggtgtatttaaagatcatacagaattagaatggactataatacaatgactagtgtcctcatgagaagacagaagtttagacatacacacacagagaaaatgacatgtaactattgaggcagagaatgaagccatgtgtctacaggccaagaaaggcctaataatctgacaacaaaatatggtattcctttgagttgacttgttcccagtgaacaaggtctggctgctaaaattatcttttaatgtgaaaatgctcacagatgaattactcagtaatttatgctagaatatttccataaattaacatcaagacagtgatctacatatacacatttgtcctagttttaaaaattgtaacaatctctacttttaaaacatactattattacagtagtattattatctttgtagttttgtgggggttttttgtttgtttgttttcattttttgagacagagtttcactcttgtggcccaggctagagtgcaatggtgcgatctcagctgactgcaaattctgcctcccgggttcaagcatttctcctgcctcagcctcccaagtagctgggattacaaaattaattttgtatttttactagagatggggtttcaccatattgctcaggctggtctcgaactcctgacctcacgtgatccacctgccttggcctcccaaagtgctgggattacagatgtgagccatgccgttttacatgcatttttcaagaactgagaaataagtaatatgtacatttaagtgttttcataattatttttattgtcttttatcttcagttatttcagtgacccttaataattttcagtttatatttgagacacagttttgtttgagtagcttccaaagtcaacttgtgacatgaaaaaaatgcatggtgaaaaaattcttaatgtagcatacttggccccaaaacatggtctatatggttttgtgttacatatacgtgtacttttactccatatctcatgtacacagcaattcttttgctaagaggaaagtcacttagctagactaaaagaaggaataatgcctagtacatggttaaatattagataaatgttagctatgatcatataatacctttattcttattatgaatatattaaacttatagtagtttatgaaaaagagtaaatgttagaactgtttagaatttcctactccataatccagtcatcatagctaacatttatctaatatttaaccataaactaggcgttattcttttctttatttgacacagtctcactctgtcacccaagctggagtgcagtggcgcaatctcgattcactgcaacctcccgtactaggcattactctaagagttgcattacatactatattaacatagtttgattttttaaattcattcaggaaattttgacctagagaagttatggtttcttggaagattggacccaaaattcagggagtgtgtgtgtgtgaatgataaaaactctgctatactatccttggttgagaggctggaagcaaaataagagttgagtatttttacagtctctcacttaagctctatcttcacaatataactaattaaaatgtttacataattcttagcttgtgctaagcttcagacagagaatttaaaagtatgtttccttaattatgtttcccttctttctgatgattgtgcttgatactttttcagtctgatctggatttagaatttgtcatgtaagtttttaaaagcgctgtgatgagtgtaaaatatagtttcattgaatgttgactgtccttttttttttctttattctttgtggatcttaatcatatccacagcagaagttccccctcacctctgagccatgagattttaaggaagccaagtggaggttttatgagatgctctgcttttaattgaatgaaaatttcagcagatgtttagctggttaatgcttcccataaatttatgttttgtaccagtgccaatttttaaactgccttaagagagaatcatctcacaatctcttttgcagactaatactattggtcttactggcacttaaagtggtcatgcctttgattcactgtcaaaggcttcattcatttattcacacgtcaggcagtccatcggtcaatcatttgagaatgtgcaagatgttttttggaggtacccagatgatttatactgcttgtgcttcagctgtcctctgagtttagtagttactttgatatcttagtgagggatgctctctagtgttttcctacagatgtttccatgtcatgaaatggcaagataaatgattttgcttttatctaaaaatcacatttgaagggcaacattttgttttggagattccattaaaataaattatggtcagaggcatggactaaattccctcaaagggtttgctagtgctctttgggataacctttacttcttgctttttcaccccctttcatgattatggagtgacaatacatgtagttttgtctagtctattggttttgtctagtctattgtggagtaaagttaatattgaatagcttgtaaaaatcaattttcagatttctgttttgattcagtaaacagatatcttaagctcaaaacaataaacacaaaccttttaccaggttaagaaatgcagagattctttgtcttttttttttttttaattatctgatgttttgagctttatgcctaatgcctgtgttttggtatgcatattatttacaaaatcagttatttaaatggttttaaaaaatccaagccaaatgcagctccattaatttctaaagatctttttgtttagttacaaaatacatatttaagtgatatgttgcatcttttggattctagttgtcagatccttgaaaacacgttaacaaaatctgaatgtcttccttcatgccttaggatcttcttctcttccttctctgcaaaaatttctccaccctggatttacttcctgaccagctgcacattttctttggcttttgcctcctccaagattcaaatggcttaattttagtgtgtaattaatgcttattttttaatacaatagtggacaaatcacaaatttcacatcacatgctatgcaagagaatgcatcagtaggcattatgtgaatgattaaattaaacctaacatttatataatggtaaaaattcttcctggcattgcaaagagctgtggagtttgtttagggtttctctgaaatttcttcttgtatagccctccagagatctgtcaaataaataacagatgtagagattatcaattattgttgaacgtttgacaaaaacaggcaagccagggatttcccactggatctcttcatgttaaaagaaaaaaaaagatcttctagccagaatcaagtaattaatctagatagtatattattagcatatttttaatgtaattttgctatgttatacctgcaaaattttgtcaggatgaggagggtacattttctatatccctgaagatagttatttcatctctatgaaataattaaattcactgcattattatggtctctagtagagctgtaaagacaaaaaagttgcaaaattggtaaggtctttgatatgtgtattttgtggcttcctgaattccccattcattcatttagtcccatcaatgtttattgatcatttcctgtgacctagaccctgtccccaccactggccatagagcagtgagcaagacagagtgctgaatgacatgaagcttaccttccaatgagatgagtgaaagtaatcaggagacaaagttatggtgttttaggtgatgataagcacttgaagaaaataaagcaatgtaatgggttagacagtgatggaattgcaatgggaagaggctgttttatcaagaaatttaagacaggccactctgagatggtgatatttgatcagagacatgacttaaatgagtaagtaagctatttggatactggtgaaagagcattatgagtaaagggaacagagaaagcaaagccctgaaattggactggagttatttaggatttagattgcaccataatgttttaaataacaaaacaaaaggaactatttattatttgaaagacattggaaaatatggacaactgctccaatatttatttcagagaggaggaaagaataaatccagggaccgttttgaaaggaaagactaaacataagtctctttttggttgtactacatgtagtccatacccttcaactaaaaggaacagaaacaaagaggaaggaatgattaatcctatcaagagaagaaaagatgtgaagagacagaggaaaggctattaggcatgtgttgacatgtggggaggggagtggcacgtttttcattgattttactgtacattttcaacaaactctaaagcacaagatctaactaatgtcttctttttttcctgtagtaaaaggtattttaacctatgaatggaattctacatacaatactcaaagaaaaggcatttgcaaagacacatttgattaaatgcacgtttttcgtcagacttttgagttgactcagaagaggtgctgattttcattatgatcagacaacagaaattactgaaaatcaaaatacaattgttgatctcatttcaatgctcaggacaccactgttttatgattacaattagtgttaaaaaatatcttttcagactgatgaagtttttaatgtgaaatattaaaaaaataccaaatacatagaagatagaattcaataccaggagacataaaaaacaaaattcagtttcttctctggcaatatcacatcaataggatatttactgttaatttagtgttaaattaactagtcttataaactagtcttataaacatagcattattatataaaaatcataatgaaaaagaaaactagcaatgtaaaaatctgacatattataaagtttatgtaacttgtatttcagtacataaaagctaataatataactaaaatctattgttggtctattccaaaccagatgctgtggaagaggtttgcctgcattagtactttaaccttccttataactaaatggcacatatagtattattatctgtgacttaattatcaaatttacccaagattataaaggtatgaattaccagaaccaggattgcagcctaagtaagctgtctccagagtcccttctcttcattattattttaaatattagttttaaactactattgataaccttttcagaacttttaaaaaacaccatgtaaaaaagcaagaaatggatgaaatacacatcttttatatcatcagttttgttcaattatttatgtatcgagggttatttctctgcttaagattatatagcaatatgtctaatgttttgcatgtgtaacggtcctattttctactattgtcttacttgaagtgcctgggtattgcctgtttgccctccttgcattcaccgaccttctcttgaaagctatattttaatttgcccatgtgtggagctatgaatggaactaatggaaggttaaagggcaggaagcagagaaaggccagagtgtttctttttcaggtgatggtggcttcttattcttgctgaaatctggattatttaaacattaactgtttgtttgaagacaaacgtttcagcccatagccccaaattaaatactttctatttaaaatacctagaaaggtttctatattcttgactagacgctgactcatacagtgactttttgcattcaaaggcagtgaccaaaaggatccttataattgataacttctcttcttaaaggtagaaaaatggaatggcattttaaaaaacttgaattcacctgcagagagtcagcagcattgtttgccagcagtagtgtcaacaaatttaaaaaagtccaaattgaattaatcaaaataaattgttaagacttgagtttatacctaaagaacaatattttggcgtctttccttccatatggaatggttaactgtgatattacactcttccctctggacgctgaggattcttctggctgtcattactaaagctcttcctaaataaaatacatttaacactgttttgtgaccctccatttggacaagtttccatggtcagggctattttgttttagaaactgtattaacttgcataattgcaaatacattctgttagacccataaagaaaaaccgcttggctgagtatcattatagctaatattagagggacctttttaggtcaggcagtctagaactgttagctactgattttcttagcacacccacacctagcatagttattggaaaatgtatcaggtagcttttgctagaatacaaacccaaaactccatgtcttaagacaaaaaccatttattcacaattttgtgggttatctatttgggctgagttcatcagggaagttcattgctgctctacgggcttactcaagtttgtggccggctgcccatcagctaggtgatagtttctggggggtgatatggctctcagcaagctggtttatgatagtctcatttggtacagctggaatgactggagcttgcctccatatggtcatcatccagtaggatatctcaggtttgttcatatgtcagctcagagttccaagagcagcaaataagccaaagccatcgtacaagtgattttccagggtctgcttgtatcatgtttgctaaggttacattgggcaaagccagccaaatgaccaacccaaattcaagattggagaaatagactccatatcatatgggaagaaatagtctatatcattataggaagagtagaccttgtgatgattattataatctgcagagaatataaacaatgggcaaggtatttcattcaaacaaggaaaaagaatgaagcagagagccgatttgaagggaccatatgagaaaaaatacttttaaagaaaacaagatagaggaagaattagaaactttatcttaggattggagtgggtatggatatcacagaaagtgaacaaacaacaaatattttatgtctatggccagagaaatggatgctttgagagcaggcacttaatcatgaattaatctaaagtgaaggtcaaagtgtggtcaagtatttctttgctttgttaaatcttgacatggtatccacatgaatttccacattagtcccaccaaatgaaggaaacctatgtgaattgatatatttagaacttccttaccagaaagctcaattgtatgttactacattcttacattggaatataagagttgggtatccagcttaacttctgaaaatgctcacacagtaacaattgcaactccgtatctgtggacatggggctagaaaggaagataccatgtcacattaagatattttctttggtatttatctacttcttaatcccccattttactaaaatacataagtaagaaaagtattccaaagtctgtaatttagcttatttcttaaccgcaaatatgttacctagcaaccattgaaggacatctttatatctttaaggcgaagtacttcatattaatttagcaaacatctgtttccttatgagaataggcatgctttcattgagacagtctgcatgtacactgctctcaatggcaattatactccctttgcttaatagttgatcagattaacagaattctagctcttaaagggacactatttatttgaccctattgaaaatttaatcacgcttggattgtttggtgaccttttgtcactgtgggagctctgagattggaatttgaagtgaacagcccatgatttctccagaagactgaattatcacttatattttagttttgaaaatgatgctgtaatttggcaggtttataacttaccactaattgaagcaatatttatcaactgcacgtgaaatatagcatggtgttaagaactctagagattgttaagtttggttaataatccgggttctggcactctttactgtgtgacatttagcaaattgcttagtatctttaaatagtagtttcctcatctgtaaaataagagtaacaataaaaccttctttaatgtgttgttttaggagtcacattagtgtgttctaaaccccataattaaaattagtgctctaaatcccataattaatatttgaataaagaataccatgctatatattgtacttaattttctcagttgctttatcaaaattaaccagttttattttgtttgaaaaaatggattttgtttcaacagtggcttaaaattggacatgaagaaaatggaaaagtcagatttaaaaaacacacaacaaaaagccccaaaactgtaagatgaattaagtcctatctgacctttttacttataaattttatagtaccaaaaaaacccttcatgacaattttctggaaatacaattaacttgctattgtgaaaaattaaaatgcatttttagctaaatatatattttgaaaattagaattatcagaaaaacaggtacaagcctttgaatttacttttaggtacaatactcaaacaccttctggttcatgtaggcgaatatttgtcatctttttccacttgattcacatgtgtgagtccaaatgttaaccagcaatgtttgttacaaaaaaggaagtcatccgaaaaaaaattactctgcagatgcctcttgtcttgagaaagaaaatattatcagaaaataatgtcagattgatgactgattcgtcctgtgaatgcggatagtagtagactttccaaggtcaccatttggattcatatgaattatttgttcatatccttgtcacaaaagggaatagagtggctgtgggtactttcaattagagaattttgaacctgtgtttgaagatttggatttctaacaatctcatcataagaaaacgaaaaggatacctattcttaaggctcatctgccagtagagaagctgaaatttaagtctagtggtatgtgaaatattcaacagactttgtcaaaggcttaactttaaagctagggtaactattttgaggaaaaaatgagaaacgtcttttggtcatcataaatctagtgcctgaggatatgcatattcaagatatgaaattctaaaaatgttaatatttactcaaattttaacttggaatttttgagactaataaatgttcctcagttaaggcaataccgactgtgaaatagttcatgaagtcatagagatgcagttcaaaattctattttcattattcatagaaatgttcaagaacaaggattagccaaggtaggaaccattcacttaaaaatcctgaaaccgagaagtagccatacttacataaacgttggcagcctggaataaccaacaaattgtgactattattaaatgaatatattagagcaggaaaatcatgccgttgttaagaactgcagtttggaaccgacttgggaaagattgtcttatgataagttttctcatagctaaattccttttccttggagttaaaatgagagttacaatttctaacgtgaaagatgaaaaatctagtggaaatgatagggttaaaatgatatatttttatgaggatacaaggcagtacttggccaaacaccttgaaaaattttagtgtttctctttttattttttataccaacaaagaaggtaatatggtgccactgaaaatgtatgggtattgtagagagagagaagcaattttaaacttagctctgtgacttgctacttaatgacttggggcaaattagtcaatgaatctgagcttcaattgtttcacgtgtaatataacaatgcccatatcataaggtcctttggaggataaatgaaataaggtctgtaaagtgcccagcacatgggcagagaatgctgtatagggtaacctttatgacttagtggaaacagtggcaattatatcaaagttctatctctgaatctttgtgtcaatgaacttgaagtgcaagacctggtcatatgcgtagcagaagctacctccttggtcagccctgaaaacacttcaatttagccaccagttccaattaaaaatattagcccagaagatgccaaaatagctaccttggtatggttccctgcctctgtgttttgaaatttttgagctgtgaaccagagaggtttttttgggttttgttttgatttgtttgtctgtttgtttgtttaatttttgaacttttggagggccagcgcttcttttccatctcctaacagcttttcgggtcattcgggctcttgtgaatgttttggtttttgactgatccctttattttttagttattctctgacctccactactctatttttgggaaaatccctcgtgggtgtttattaagacttttgcaattcctgtgtgccctactccattgttatcctacagaggtgttgctcagacattctggacctgaacaggccactccaaagtgccttgccctttcagaccactgttccagcttaggatcccacctatgtccagcattgactttactcttgtcccctcggcctgtgttcctcaaccagaaacttcttgttacttgtggttctctctttgagaataataatgagtgtttttattattgacttgaatcctaagactcattgtacctttgtttttctagaagaccaaaaaatactcttaaactgttctcattaacttccttagaataccaatgaggtaatgctttgaaatcaattttaattttatgagtaatatattaatccagaacatttttaattataaagaacaatatctgaaatcagatcacccttattgtaaatactattacaccctgaatttgcttctagtatttttatacgtacatcttaagatggttttctattctacttttttttgcatcatatttttcattttactctacaagtatcacgatttttatttttgatggctacttaacattttgaagagtgaataaaccataatttgataataacaatttccctatcattaggtgttttagttccaatttataaatattataattaatataaactacatttttggaatatcagttcacataaaaagagaataaaggaatgtcatagtggtatgtggtaagtctaaagtcaatttaagaaataaaaagcacattttctatcgctccagtattctaccagcttgattatgatagtgaagaattttgaatttaaaagtcattgcttatgtttttaaatatattttaagctatcgaatttaatttcacacacacatatcagagctaaaataggagagagagagctagatttagaaagtgatcatcttccaaatttttaaaaaaatctattttactgaaatttggaaacatcattaatgtagaaataatgtcataaatgatggttagttttcttgaacagcccacctaaatctgtatcatctcttctgtagatttgtaaagtaggactgtaacatctactgtatatacctcaaatgagtataacaaacaaaatgacctatttgtaaattgtaaagcaaaattagaatattagatacattcagtacctagttcattttaataataaaaaaaaggttatatgaagttccaaggaccccagcagtggaaacttgaccaacaaatgctcacactaccaccccagaatcagcagtaaaaaatgaatggaactgctgggaaatcaagctcagagcttcaaaaggaagagaggagttactagtgatgaagagtccacaatatatgctcagaagatgctattaaattagtaaaaagataaccagaaaactgtaggtacaacacaatgatctctgcaagggaaatagggatttggggaatggatttttagctctctataggagttgtaattgaattcctgtacataagggagttgttctcctaagggtctggctgcaaggagaatctctgtaatttaaattaaaaccagctgctctaacaaactcctgaatttcaatggctctgtacacagtagactttcagcagtccacagtgtttcctgggggttgggtatggagttgagatgctttgttatgtacagtcactcaagaactcagactaatgaaaacacacattttcattatgtggcctcattgttttacctggatatatcccaggtggcccatgggcaaaacgaagaataggttagagtatatttttgtgggctagagtaggaagagatgcataatactttagctcttattacattggtgatatctagtccatttttatccacctaaatgcaaggagaggagagctggaaatgaagtccttggtgagaagctgctttctagagaatattttatgctatggaaggtggagcacaaattttggtgaacagtgaaaatgtaataggttctctcatgaggggtggcagtagggggacttccaggcatgaggcagctggaagtgtatccccgcttgggtcaactcttcacaaaaagtagtttttgcacagtcattaattttcaacatagatatctaaagtataatgttccttgtaatatatcaggtaatacatcagatatggacaaagaagaaattcaagataaggatattctatgaaagtaaattagtttctgtgtctcaatgcaattaaaaagaaagtagtcgatctaaatattgacatgtgcaatggttatttgaaattactacacatttgtttggggagaatatgtttttaaatgtaaatcatgagtaagcatattccattgattataataatgatgacttatagtgtatagctcattttacttttgcacatgttttctattacagttaatcctcacaataatcctacgagataggcagggtagataaggatatgatcctagcatgaaagacaagactcaagatccagtagttagtggtggaacttggaagaaagcccagaatttctgactccaggctccatactttccacttctgaaacccttcaaaaatttaactttacttttttgaagggtgggggaatgatggggagggtgaaaggttgggaaaaaaaacaagattgacttatgtctgcttctctaactagtgagaatttttactttttgtgtcttgcatgttgaatgaatgttttagaccatatttcacatatattttgaaggtcaactttaatcataggaataggtttataagaagggaaattttctaaaatttggtttagaggcttgaatttgaaatttggggctaatttaaaatctttgacttttattcattatcttatatttgtatataaaccgtataagttcatatagtgagcagtctgcatgttttctgtttttatttttattttcctttagctaatatattccaataatttgtaagagattcaaatggaatccttagcattttaacaattgtgcattccagcaattgtggtgcattacaaatgaaaggattttaggatgaaaaggcggggggaggtttagggtggctgttaatgctatgacttctaagtctccatgctctcttagtggtcatgtggttggctcattatttgagcagcatcgctttgcggtttgacaaggctacgcagcagcagccactgttagccgatggtcttgcaggtatgtggatctagctcctacccgtggtgatgtggagctacagcatgtcactggagagacaccaactgcagaaagctgatacataattgtgtatgagtggaatacaaaatgaaaccatcaaagtgtccttagcaaatagcaaactagatgacagatctcaccaatatgttttgctataatttattgtagttttaaaattttcaggtatttatgaaaataggatgccctctagtggggatcaacagaatcttccaagtagtctaatatttgcttagagttgatgtaaaaagaaggaaagaaagttgttgaaaaaacaaatattttttgaaagttgcttactttttcctggaaatttctctattgctccctgtcaactgatggctggattagtactccctgtgcactgcatttttatttccattacttttcacagaggctcttaaacacagcaggcagagtgttctctctcagcttccaagttctatgtttttagcctaagtgaacgtaaacaatcccttggccacttctttctaaattaattaattaattaattataacctatcttgaaacacctttgaggtagatatctatctttgtcactaacaatttaaagtatttaaaacataggaatgaatgctttgcaaggaggattgttgtaggcaatgcttaccttaccttatgcatcttaccttcccttacctcccaagcttctttttacaaagcatttcttcctagcaagagaggcttgggaggtaagggaagatatagatagatagatacatacatacatagatagatacatagatagatatagatatagatatgccatggctgttttattacttttcacttacattaaaatactatattctttacattgaaagacagtttaaggtattagaattaaatctcttgtaatttgtgaacagcattccatccacgccagaggttctcaaacattaacacagttcagaatcacctggcagactttttaaaattcatttgttgggccccactaccagtctcggattcaatagatctaggatggggcctggtaagttgcatttgtaacaagttcctagatgattctgatgcattggtcaagaacctgcattttgagaactacggtctacgctaaaccaatctttccatcagtcaatttttctctgttaattgttggaaagtaaggagaaatgctcaggtcagaagcctggaaactctgaactgctaaggcttaaacggaatttattctcttttaactttgtgttttattaacagtattttcttatgcatatttatagcatgttacttggtctttggaggatggtagctgattttactttgaatgtacttgcacaatttacatcaatttatcagactgatacaagaagaagttaaaagaatctcaagtattctcacttgttttcttagaaaagggtagagatggactgttttcataactgttttttaaaacatactgtgtggtattaatatttagattttagctaatattgtcaccagcattattagacttcacagactgttaagatgaattccccatggagctctctgttagtactagatgttgcagcagtcaaataaaggagacttttctccatattttgagatggacataagatgtaacagaaataaggtagaaggctggagttaagaaaggctcataaataaaacatttccttttgtacgagctgagagtataaatcttgagacagaaagtatgggttctatgtagcacttactgttgccaccttgggaaaatacttcacttctctgttttagaatcttcatctttaaaaacggaatagtggtaccttcctcttagggagctttaaggattgaatgagttaaactatttaaagtatttaaaatagtgcttactctcaacactgttattagtagacactacatcttggagaaagaatgttatgtagccctttcttgtcatactgctggtagcagtggaaatgcaattaaagtgaaataaaatttaagttaccaccagattgtgccttataattataatagccaactcctttttcaaaaatgtatatcatatcattttttgtagaagaaaagatcattagtcaggccccatgcatttaagaccgggtagctggttcttcattatgtattttatttctgccagagtgtttgattgactgtctgtattgaccatgaggttgcccagtatgactgcatcactaaaggttagagaaggaaaatgctggaagtgcacggtgactcatacctgtaatcccagcactttgggaggctgaggtgagcatattgcctgaagtctggagttcgagaccagtctggccaacatggtgaaaccccatctctactaaaaatacacaaaaattagccagacgtggtggtgtgcgcctgtaatcccagctactcgggagactgaggggagggaattgcttgaatcagggaggtagaggttgtagtgagccgagactgcgccactgcactccagcttgggtgacagggctaggctccgcctcaaaaaaaaaaaaaaaaaaaaagagagagagggaaggaaaatgctgactcagtttccaaagtattcagtacatttggaacagcaagaaagattagagaacaacacatatggctttaaatgaatgccgaggggttctcacaatgatgatctggacacgaactaggtagctagaatgccaaaggataagggagatggaggaaagatgaggcagtcatcattgcagagaacccctactaggatttcaaaattgtctgacctgttcccgaccccctccctcccttcctcattaacgaaaaacttatgtgccttatccttgttggtactgcccatggtgccaagcacagtactgctcaataaatgttggcaggtttgatttgactatgaatgacatggtttgtgttatggcctcagcttttttctctattaaaaaactgcatgtaaagaaaaatcagaacatactgtagttagcatagtaaatcctaccctttcttttcctatcaacttacctgtatttctgttcatctaaaaatttcctatttccaatctaataatagagatatgtaactagattctaagctagtgaattgtggctacaattttaaacagataaatgcagttgcaaatgaaaatattaatgtaatttcagctctgataaaatctgaaattgagttaaagggtgcacttgatatctgcataacaaagtgtcactgggatgggtaggggtaggtgccagagagttcaggaggtcaatgttgattatttgtccatctggctttatggtcaaaagaagtacagtagcctgctgtggtgaattctctgtttgggtaggaaataactctcagagtacttgaaaagttaaatgctgtaataatgatatttatgcatatcaatgtagtttattcattttgtctgaagacagctaatctcttcatatgaaatatatcattagtaatatgttagatataccaggattttaatatattaattaaggacttgtattctttgcaactaaaatcaaaccgttttaaaaaataattaggagatatgtatattttcttaaaacctaaaaaccaatttttagagttccatttttagagttccattccattagcctgtcaaagccaccacattgcatagctctggctgcgtcacggacagggacatgtcattgaccctataagctataagccagtctttattgagtgtctactaagtgggagacaccagtatctagctaatccaaaccagaaatttgaatttatccaccttgagtcaaatctgtttcactttcaagtcttgctgattctactccgtaaatacggcttttctatatccccacacctttggttttctgtatccctacctcatcatctttcgctcagactctttttataaccttatttttatttatttatttacttatttatttttattttcttttaagatggagtcttttaagatggtgcagcagcatgatctcggctcattgcaacctctgcctccctggttcaagcgattctcctgctgcagcctcccaagtagctgagattacaggcacccgccaccacggccagctattttttttttttttttttttttgtatttttagtagcaatgaggtttcaccattttggccaggctggtcttgaactcctgacctcaagttatatgcctgcctcggcctcccaaagtgctgggattacaggcatgagccaccatgcctggtctataaactttatttttaaatgaatgattttcattgttattagactattaaaataaaataacatgtaaagttctacaggtaaacaaacaagagcagtcctatccctagctcctctccaacaaaaagaatgaatttctacccatttagcaatttcttatggtgattatttttgtatttccaagtaatatgctttaatatcctactttatgaaatttagagactattgactttttgggatggtatataaggactttgcttctttataacccccttcttctctgcactacccccaatatacttacactataattttcagtgaaatctatattgttttcattgttcccatgtaaatattattcactaccagactaatactagcctaggattaaagtctctttcttaaacagagtttgttgttttttttctatagagctaataattgcctcacttttttattgtataatttatgttgactttatggctacatttaccttttttttttaacagtttccaacagatctgtaaaatccatccgtatacaattttccttataatccaattctcacacagtgcatcagatttattatttccctagtgttaacaattctagaatcatttctctttgttccaatgtaaaatgattgctctctagatctgttacatagcagttacactgaactttccttatcatcagctgaaaatgtctttgcctctctcttacatttggtcacctgtttgttggattccattattttcacttctgatagcctccttacaagggatgtatgaaaatatttttttctcttagaatgtttttgtataatatatccttattttattatcccaactgttggaaagtttgtctaggcatagaatttgagattgaaaatcaatttcctccagaatttcataggaatttctctgtatcttctagttgcaatgtcactgtagagacttgtgatgtcattataatttctgatcctttgaaggtaacttgaacttttaaaatttgtttctttgtgccccaccctcctgaagcttttagaatattctttttatccctgatattgttatcaatttttatcttcttaatagtgatgaacactttgaaaattctttcctataatttttttcctatcttattttttggaactagtatttttttgacacttgacttactgaatcctctaatatgactatatttttctattattgctcatctttttcaattttgatctcccttccaataaaccttctcaatttatccttccagcctttcagctttaaaaagtcaatcatatttttaatttacaaaacttctacttaatccctagatcttcaaatatatgtgtgtgtatttgtgtgtgtgtgggtgtaagtgtgcatgtgtgcatatgtgtgtatgtatcattcattttcttctgcatccgctgaggaatgcaacttctcatttctagggtattaattttaatttccctgaagttctcttatgcttcagctttgtctgtattttattctggcttctttttatctgtctattttggtatctccattttatttcagagaattttatcaaacccctggtaaacctcaattctctgtatcaagcatgagacaataaaaatctacttggaagcggccaggtgcggtggctcactcctgtaatcccagcactttgggaggcccaggcaggcggatcacaaggtcaggagatcgagaccatcctggctaacacgatgaaaccctatctctactaaaaaatacaaaaaattagccgggtgtggtggcgggtgtctgtagtcccagctactcgggaggctgaggccggagaatggcgtgaacccgggaggaggagcttgcagtgagccgagatcgcgccactgcacgccagcctgggtgacagagcaagactccatctcaaataataataataatctacttggaagctatttgtgcgtgtgtgtttgtgtgtgtgtgtgtgtgtgatgcacatagttgttaatgtcttttgtgattcattataggccatcctataatgatggccagctcattgattcactgggtaccatgagtgtcagtatctgttgatcttagggatgatcattgttgtcaaagacagattttttaaatctgactggagtgagggtggaggatatgaaatcctatattcctgaaggagagggtgccagggaagcaaaaatcagttgctggggtctcaacataagtatatataattttacttaatccttttgttttcatttccatgcctttaccttttgtcttcctgataaccctaagtccggattttccctaaagtatgtcctggcttttgatgggagaatggataggccggcaacaatataactcttgaatttggttcatcctaccttccatttgatctgatgctcatactttctgagccattctgggggtctgtgggaaaatctgtttgcattactctgtctccctctgcaggcttctgtgggtccatcttcctttactactctgctacatgtgtatcattctttcatctgccttccacactcatatattgtgttcatggaagatagaatttgagttaagattttttgttcttgctgtcctgtgggcaatttcttagtaaatacagggcagaaaactattttatcatctagaatacagaagtcttgtaagtaatctgtctttactttcttgactctaaacttgactctaaactccatagctgcactcaagttcaagtttagtaacaggagcatggctgtcattttcatgttccctacatgaaaataaactttcacctaaaaatcttaataaagccttcttagcttcagatattattgctttttgcccaacccttacctgattcctggcctcttcctttagtgtttccatgtgccccttccccatgttctggccaaatagaactatacaaaattctctgaaatcatgaggctatttcatagctctgttcctctgtagatgtaattatttatgcatattctgcatggaatatgctttccccttccttctgattgtcaaatctcatccttttatgtgtcatttctcaatcatcattcttctgtaaccttcatagttatgttttactctttttgctatttttatttaaactaattttctcttaaaaatggaataaattgacttcataagggacattttttttgaagttaagtgggagctattttgtgatttttactaacacgttaaattacttgatcagatttgcattttaaagcaatcactatctgtagtgtatagaatagtataatgcttagcctgcctgcactcagaaagtgtttatatgactgttagagtgattgggtgagagatgatgagaagcgacccagggcaatgatagtagcaatggaggagtggaagggtgaagagatgttagggagataaaattaacagcactaggtcagagattgaaagagaatgacagaaaaaaagtaaaaggaaattatcagacttcaatttatgtttactttataatttacttgccttcatagaccatccaccgatcttatggggtagtcaactcattaatattcacttttaaatcaaactccaaagttgagatttttgaaaaacttcatacagtgtgagctttcattttaatgtgaatattgaggtgaactatctgtacagactgaggtgaactagctagatggtgaatgtattacatatattgtgacaatatgatgttacccaaaacttttaatggattcgtttcataattataccacatgagctattgagatttctagaaggcctacaagagtcatgagattggactcattcacagatcttttggtcatatcagttctgtaacaacaactgcagatccagtctgtgatcaacttttcaaaacatctaaaaatagtatgtattgtgtcttaatcccacactgtgattttgcaaccttctttgtccaatgttgcctaccatttttgaatttttgagtcttaaaactgtggtgtacaaaattatatctttgaaaaaatatataacttcaccttttaagcctctttctctgtatagtaggagaaaatgtatttatctcagttcaaagtaacataatcactttcagtttaaaactcagtgtttgagggccaggctcattcagttccagattcttccttttctttctgcagtgatgggctggggagggttgttgattgtggttccttattatcatggcaccaggggtgacacagcttgttcattgccattgctacccaccaaggctgctgtctgatgagtgcccgaaggtaggattcctgtcatacataacttgacttattttaacctatcctcacatcttctgtgccctttttgcttttctgtgccagctctatacatccttcctgtcctgatttcaagtgctctctaggatcacttctttcttccagaaaattccatatggctcttgggaaattataaaaaaaaagtatgctttcctatactgttgtggtcaatgttgtcctttgtgattccattctcaggtccaaatgctactttgaaactcagtccagagaggtaacctcttaaatctgttctagggctccttttccttccaattctcttccctatactagtttttctttttgtgggaaaaacacttacttcactgatcacctttccctaaggtatgatttctggttgcactttatatgcttagtcttttgctgctttttaagatgtagaagtccagttattatcatagaaacccttggtcttcaacacaattcctgttatgtcttagaagaacccatttaactttacaaagccagtaatttgaacataccagggagcagtgcttatagaaatgtaatgctactgcttgaatgttgaaggaaaacaataatgttttaaataagtacagggttaaaattagctcagctaatatttttaaatcctctgattatattcataatatcttctaatcaggttacagattagtgtgtttttattcaaacagacttttaacttcaatgaagaggcagtctttcccctatcacttctccctacttcttcgattatttaggattccttaaaaataagttactttatcccattgaaacacatatacctctatgtagtgtatggaataacaaaaatagttataatcatttttatataactgagtggtaggttacttataaaatactaaccaaatgctaaaataaataatttttaaaaatgtaggagcagcttgctgtgacagacaaagatagtatgtaatactgtcagtagtaaaaaaaaatcacaaatgtttaggacttcaaggaaaatcagagtagatctttttctgatgttgtttcttcatagcaggttcacttctcaaaagaaatatggtatcatatatgttgccttctatttcatcctcatatttatagtgaataatgagcactgtaagagaaatatcatagaggcaaatgatgaagctacaaggtcattacaacttcctgcaattttccttaattagttaggtaaactatatttggatgaatatatatgatttaagagtttaacaataataatggtttacaatatttctcatggttaatggaaatgtatttcatattaaagcagtgagctactaataacaatatttaacatagtgaaagtccatattccaaagtagaaattcattaaatcctcacaataattccattggttgaggtattagtctgttttcacactgctataaagacatccctgagactgggtaacttgtaaggaaaagaggtttaatagactcacagttctgcaggctccaaaggtagcatggctggggaggcctcaggaaacttacagtcatggtggaaggtgaaggagaagcaagatcatcttacgtggtgggagccagaggaagagagagagccaagggggatgtgctacgcactttcagaaaaaccagatctcatgagaactctatcagaacagcaagggaagaagtctgcccccatgattcagtcacctcccaccaggcccctcctccaatactgggaattacaattcaacatgagatttgggtggggacacagagctaaaccgtatcagtaggttataatattattgccattttacagatgagaatactggggaatttagagaaaagaaatgttcaatcaaagtctgcacaaatattaagtggcagagcagacattccaacaatgtgaattgttcctcaaagaatacatgctattgcataataggccccaaaattcatactgataaatgtaaaatataccatgatacctttgatttttatcacttttaattatggttaatgaatgattatgcatgcaattgtactagaatttctaagtagccctcttgtaaacgcaatctcagtaattcttctgaattccttgagataaaattattagatgggatgatatttatattcatcacgttgaagttcatcaaaacagtcgaagaagactggcttcagatttccagagataaatcgtattggaagctttagccagaacattcatgattaaaatcttcaatgacccttttacaaaaattaccaaacactgaattatgattagtttgatattgttcccaattataccaatttcttcactaaaaaaactataattaattcatagcataagcctgcaaaatacattactgcacattttgtaactcattcagctgaaactaaaatgttaaatactgtgattattatttttgtgataatgaactgagggcaattttggagttcaaatccaatttcaggacctgatttcaccatcctgttgtatttatttaaagatcacattctaatgacagttgacaaggttgtttgtattctctctcatcacggcattacagtacatttattgatgagttttaaatacatttttataccatgtgtcctttgctcgaagtctccttaaagacacaactcatttttccacctttgtattcaacttacacatatacaattttgaaagagagaagtatgtttgtatataatattttaaaatatatttacatgttactttgtaatttttgaaatatttcaccatctagattataatatccttttggaaggcactggttttccctctcttgtcatttccttggagggtctcaagtatcttttaagtatggaagacacagctgtttattagaaggaacaaataaagtgtactacaattatttttaaatttgcattaaatttctttatatagccattgctctcactgattgcagctgaagttagaaatacggcctgagcaaagtttcagatattagagatgctggacatatcaaagcccttaagcttgggattcctctggaagaaattctggatcaaacaaaaaatgatttgtgagctaaaacacaggtattaccaacaaggtatcttgaagccaactagctggcctcccatttgttttctcacctaagtcccaggatgaatttggataaaggctaaggaactgttgacatgcatttggagaatgaaagtattcttattttcactttccattcatatcattttgttttttatttaaacaaatgtttttgtataattaatgttatcataaaacaaaaccaacgaaatacagtttgatggaagtggtgccacaatagagacattacaggtctgaatgagaatatgacagccttaatctgttatttagatttccctgagttcagatggcagacagattcacaacacctgtgaagtggaaggcaggcagaattagtgataggagtagtgtcagaagcaattactacaatttctttagtcttctgatgccagccttctcaattttcttaacatttgtgaaattataactttaacaagtatttgttggaaagctatcacagcaaaataaaactagatgccatgtgatgataataatagcaagcatgttttttcatgactagctttgtgacagatgctttacaagtgctatcttatttagtcctggcacaatcctataatgtaagtattatttttctccttgttttacaacaagacttttttttacaagaggaatctgaaggttaagtaacttgtccagggttccactggtagtaagtggtctcaagtcagatctgtctgactccagaactcattctcctcacccttgtgaatcctttttcaacccatggccccagtctttgcctatggacagatcggcacaactcaagtctgacttaacctgaagtttctactagaaggccaaaacaattctatcatttaaatgaagtgttaagaaggggagtgtgctcaatgttttaaattctaaacagtataaaatccttccaaaaaatgtatgatcatacaaatataatcaaatcttaactgagaaaaattattaccaaataaaagcatccacctaaaaatcatgtatttgtgtgctaattcaggagacagttatgcaagtaatttttcttacccttcaatatcttcaacatagagatcatggatattaataaaaggagatgcaattttgctctcacatatatttttcttatgcaatgggatgcttccagttgtttacatctttcaagaaacttaatcaccaccagatatgtactagtcttatgatgccagtaggactactttgtattttctaatagaaaggaacactttttcttctgtgttgtaatcttgtgatatttagacccaagattcattcaaaacacttagcagccccatttctaggtttttgacatataacaatactagcatatgagttcaggaaggtacatatgtcaggctgtctcttgcaactttagatataatagaaacacatttaaacaagtcaaatatctatcaactgggggattgatatatataatgcaatattaaaaatagatgaacatacatgaaatggctcttagaaaagctgttaaaatattgttacttataaatttgaaactgcaaaataatatgtaaaatttgagccaaatttggtttaaaatgtgatctcgtgtgtgtgtgtgtgtgtgtgtgtgtgtgtgttctgtggcatggtgtgaagtgcggtgtagatacatcaattctggaactcttcataccaaattattcaaaaatggacagggttgaaagttgtggggagactttcattttttagtttctatacttctggtttattattattacttttttaaatgtgaatttgctttgttagaaatgtttaaaaagtttttaacatgcttggcatttagtgttcataactataaaatgcaacttaccttttcagcctaattttccctaattttagacattctgcctcaattacagtttttactgctgtgtcctagatttctttgcctgtcggcttttctatatgttatacccactgcaaggaaggtccttctcctcacttctcaggcctaggttctatgttatttccagttctaattccagtgcttctaacaataattttaacaagcgtatttcttactttctttcttctattctcatttcaaatattttgtttttctgttacaccacatcatagagtgccttgtaataaatccactaatatatgcatatgtaccacccataaagctgaaatcttcatgcttatttttcccttacaattagtaagtattctattcaattgaaaaaattaacaatgttttatttttgtgaaatttttgtagagtttcagcttttctgtatatcatgatctgctgttgaagagacacctctattttatgtcaaattgtcaattttgtgccttataatccacttctgaattctacattgtaatttctgtgtaataactccatttgctgcctctattctctcatataaacacatttcaagaggcttaaatggaagacgacaatccaaatcaaatttcttagacaggaaggtatttgtaattatctcataaaatgatgccaaaatcttgtcacatacagtatctcacatgacaaattcaatagtgttctcagagaaacacaattttttatagtaatgtttctatgtaaatcagtccaggtgggtttcttttacatgaacaagcaagattgttttcaaaatgatagaaacaataaagagagagaaaacccaaactgatttgcaatgggagtttcctcagtagtcatcccagagggaagttttgctttgtcacaagtgactagcccttaattttgagagtgaatcatcccctttgaaatgagagataagttggggaaagagctgtttaaaaattactttacaactatttcctttagagctatgacttcttaaactggaatgtgatccagaatagcttccctttgaatccaacatttgtcttcagcattttattgtctctgttttccctcaccccatctcactttttccttctctctgttcaacagatttacactgactgggccaaccactacctagcaaaatcaggccacaagcggctgatcaaggacttgcaacaagacattgcagatggagtactcctagcagaaatcatccagattattggtaagcccttccttctgaaagaaagcatgaaagtctctgctcccatctctttggtaaagcacaacttaagttaagcgccttactgaactggtccatgtgtctctgagattcatgtagctctcccctgatttaattaaaatgtttatatgaggatgtttgaaaaaggcagtttggccatacttttaaataactagaactgtatctttatatacataaacttgctaacctttattgaatcatttgaatcgaactgtcagaaatgaatgcttcattaaaccatatgtctcccatgtgtgtatttcgttagctggagcaactcatacactctgagatgccttgaaactgtatcctgatccagcagggacaattgtgaaaggtttcatgtcagcaatcatttggcacaggctaaagaattagcagcaacttccttctcactcatttttttttttgcctgatttgtgcatatagaattggcagctgctaataagtgtgtcttcttgtacactgcttggaagacagaatatatgtagcaggagcatttttgcttggtattttttttttcctgttttcgtgtgtgtgtttcacttcattgcttaagcatgtcgttctttttttctctcttttattttatctcttggctttagcaaatgaaaaagttgaagatatcaatggatgtcctagaagtcagtctcagatggtaagaatcatatttattctcaatatataatgctgatcttcacttccagaattaattgcatttgtaaatggatattattttttttctgcatgtcttcctgcttaagaaaccatttgatcccattctctcatatgtatttgtgtgggttcaatttaggcacatcaacatcattaagtgactcctatatacacatgacatatttccagatgtcttattagatccttgacttttttttgttctgctgttctgtataatttaacactggtcttaatggtagtaaatttcatttctacttttaagtggattatttttgtctgaacaactggcttaaagaacaggctttgccatgggcattttaaaatatataaatagtattttctttgttcataacaaagtccagtgtaaacacatggactcttcaacacttctggaaatagttctcaaggcatgctgctgtcagtttggtgagcagtgactgattttgagatatgattcgtagtctcttccagaaagccttcagcctggatatctgcctctttcccagctatctcttatctttatcaaccaataaaaacttcaagttttataataaagtcaaagagtaataaactatagagataaaaatatgtttcttaattaaaaagccacaacttagttttataggaaaacctgaaatataaaatgccttaactaaagttacatcaagcagatataatcaggaatgacagccgaaatccacaagatgaagctttctccaaaactcttcagcacagaataggcattttaaatgaatttaatgagttcttagttgtcagaaacttggaagaataaaaaaatctatgaacttttaaaatatactgacctactttacttaatgtcagaaaactgaaatccaaaataataaacataatttatttctaaaagtgattaactatcatgtatatttttaaaataattggccagatgtggtggctcacacctgtaatcccagcactttgggatgccaaggcgggtggatgacctgaggtcgggagttcgagaccagcctgaccaacatggagaaatcctgtctctactaaaattacaaaattagccaggtgtggtggcgcatgcctataatcccagctactcgggaggctgaggcaggagaatcgcttgaaccagggaggcggaggttatggtgagcgaggattgtgccattgcactccggcctgggcaatacgagcaaaactctgtctcgaaaaaataaataaataaataaataataaaatcaaataataaaataaataaataaaaaataattactcccaggacctattatgatgtcatgaactctgtgtatatggttgtgaaaaaaatcactgtaaaagaaaggatttctatacaatccttcagttttaaggaaacttcctgatctaattactctaagtgactctgtgggaattaattacagttgttttctgaggttttactgtgaacaagccaaatcagaagacatttagaccttgatacagtaataagctgtgtgatgttgagaaaaatatgtaacttctttgagccttagctttctcatctgtaaaatgaaccttaattagaatgtgacaatgagatatgtatgtgaacatcctttattaacacaactaaaatgcaatgcagaatagtattgctacaaactttgtaaaggacacatgcgtggattaacacctgttaaaagatttttaaggctttcagttaaaaagctcaacagtcccctgaaaccataattatgtttcttaaacccaacatggttgcttttgctttcattatttttaccatgaggaggtgttgaataatataaaacattttaagtctagaaactcttacctacttggctatcattccaatttgattctgggattacagagaattcaataaacaggcaagcttatactcagtgatggaaaaacaattccaaagctcataacaatggttaatagagatgctgtttttacctatttatctgaaacagctgttcctagagattctacaaatctgtgaagagtctcttgagtttcagactctgttaatttttttattacttcttattcctgttaactgcaaaatatcatgttacagatattatgcaagttatgttgatatttccacttctgattaaaacaaaatagaaagaccacagtctaagaaatgcaaatgctataaaaaaggtagtttattcagccaaaaagcattagttggaatcatatcgaatattgactaagaatgacttagatcctcatttctttaagatgtggttgaattttgaatctgaagttggcatgccttcaatttcttgattcagaaaaatacatatgaaataaatgtaacttttttggctgaattatttttgcctctgttcttaagaatttgtgtaagcactattagtgaataaaaattccagactttaattgagacaagaatgaaaaggaaagataattatgatagcatgactaggcttatgaatttcatgtatctactccaaacaggatgttgcctgttccttgattgcataacactgggaggtgctacattagtaagagtgagtggtatacttgctcataggactactttggccacctctttttgtatacctggtctcttgtggcctttggttgctgttggtgcttaataacaaaagataaagtaaaattaggtctgctgctatttttaatcacgaattgtttttatttaaatgttaaacttgctaccctttattgaatcattttaagcctttaagaatagaagatcccttttgttgtatgaatctacaatgtattgataaatttccatagtagccaggtaattcacatgtaatcaatatttactaagcactgagtacaaagtataataacatttggatgaactacacttgagaattggaggagcaaatgtttagataaataacagcaacagttacataggcgagaacaaaaacgactgagaatggagtaagtttggtgcattccacaaacaaatagaagagcaccgtggattaggcacaaggagagttgtttgaagggaacaaggaagcctgatagtgtagggccaaagtaaggagttggtatggtattctaactcaggaagactttggaagatgtttaaagctgggctgtggtatgatccaatataaatactttaaaagatcaccctagatgctttatggggattataaagtaagtaagtgttggtgtccagttgaatgtgggtgacggagagtacagggagcttaaaatggccccaattttttagcctgaatgggtaagtaattaccattaaacaagattattattatagaagcagaaaaaaatttcttaaaaaggtggagggaggaaggtgatgaattcatattttaacatgtggaacttgatgtatctattaaaacatcaatttggaggaaacttaaggctattagacatgtgtttctgaaggtcagaaaagagtattggttagaatatactgaaaaaataggtaatatttgaaaccatggacaagaatggaatcttacaggaggtctgcatgaagtcacaggagaagaaacctgaggtttttcactctaggaaatataaatatttatgtgatagaggtataggagtcaggaaagggaaagagtgttgagagagtgagactattgttgaggaacagaatcacagatgtggactgctaatccttagggaagatgcagtagctgaagctctaatacgtggactaccccagcaagtcagggcaaagtaagatgagcagaatgtgtaacatgctgtcaaatgttatgcagctaaatagctggtatactggaatgtggtatttctttttggtaattggataggcattgattacctgtatgtgaacatattctgtagagtgaataacgtgttaaaaagtaactcagaagtgccaatatccattgagtcatgaataatttttctaagagtgtcctgttaagacactgttagagaaaaaaaaaaaataaatagcttgagaagaagacagagttgaggggagtttttgcaaggggggaagaaagcatagaaggaggaagcagtagagggaaaggaaagggttcagaggaatgaagtggtaagtaactataccaagtcctaaaggaagtagaagaggaggaaattttggtctgtgtggaagatttgatattggaaaacaatagggatacatttgtttctgtatcatgtcataaaaggttatgatggggtgaagatacggatacttgaaaaaagtatgtatgtaacatatttgtataaacacaaatctctacatagcagctaccactgaaaggattatggccggaacagggaagaaacacataaatagaggcaagttatttgaaggattctagttctgtagggtataatgtactatattattctgcttttacaacttacataagtgttacatgtattattttatgtacatcaaatatactaaataatttcaaagtagaaaagaaagtatattaaatagaaactagaggaatttaaattaatataacaacttcagaattttagataatattaatgtgcttgcttttcatgtgattttctaatggtttaatggttactttatttattattattattattttttgagacgaagtctcgctgtgtcgcccaagctggagtaaaatggtgtgatcgtggctcactgcaacctccacctcccgagttcaagcaattctccctgcctcagcctcctgagtagctgggattacaggtgcccaccaccacacctggctaatattttttaatttttttaatttttagtagagacgggttttgccatgttggccaggctggttttgaactcctgacctcaggtgatccacccatctcggcctcccaaagtactgggattacaggcatgagccaccatgcctggccatggataccttataataaagaaaaattcaccatatatatatatgtatatatatatatatatattgtgtaaatatacacatatatgtacatatatacatatatatataatgatagcactatgactcaaaggagtggaatattgctatatacatacacatatatgtgtaaatatatgtgcgtatgtgtgtgtgtgtgtgtgtgcgcgtgcaccttataaagaaaatttaactctctatataatatgtgtatgtgtgtggatatatataatacatgtatatataatcccaacaacaattcttttgaatagcatagtccaaagagcacatatttaagaaaaatatgaatttgtccttttagcactttattaatataattactgagatattgtggttcatatttatcttaagtttcaaagtcatggttatttttctttgatgagcttgagactaaactggtcctggaaaacagaacttagtttgttggagcttagtcaacactaaatttaaccttatccaaagatgaagttactaatgtggatggcacctgttgagtaattcctaggtgggcggcatcaggattcaaaatatatactgcatgtcccaactttggtgagcttacatgaggaaataaattagtaaactataaataccaggaatgtcccaaatgcccagcaaattaaaaatagcaaaaatatgtccaacatttacttagaatgcagagacacaagtgcaagtttcttagacaaaaatgttagacatgtagggtaaaagttgtttcaatgacatttaaaacattttttaaatagaccattatatttaaggatcttcaaaaatgcacagaagaatgaggacatctgattatgtgaaatagttacaaaccaagtattaggctatgtaagacagctaaggatctggcaaatgtatttcacagcttgtccttcctctttcttggctctgttttgtcgtaataattcaattgttttccagccacaaccttcaacctaaggttttagtataacatgtatgttgtttacaatttgctgatatgaatatttttggcttcttattcctttttaaatcctagtagctggaaaattagatttaggtctttactgcctatctgattccatgtccgatagggttatggctcccagaatcattactgttatggaattcacatctttatcccatttgggatagaaatttcttgatcctatttctattgcttatatttatctggaaagtgaaactattcttaatagtaaaaaaaaagcccatgcttttatcagtagcctgtcctttaaagttttatttttttcagctactgcttgtaatcactcttcttttaaaggatttttttttttttttaggtaagatgagaagatgaggttcttaaccaaatagggaagagataaaatactggaatgctcttaaaggtttaataaaatcttatatatggcatactgcaaaattgtagcactatgactcagaggagtggaatattgctaagttagtccagtcacatgatcccttgactttgaaaatattcatcttctggaatggctagaaaaagatagcttaatgaagacaaatgctttattacaagtagagttctgatctataaagaaatactaaatgaaaatctttactttgtatttttcttaatgatttcattatttttatacaaacttcgcaaaaatatgtataaactactagtatcagggaatttatatgtaagttattagaatatcacctaaatgatttttaaatctgcctgtctctagaggttgctccacacactagtcaagttcaaatgaagtaattgacataacatggaggcattaagaggcagtgtgttttgttaaaagaacaaaggtgactggaattccaattttgtatgtatgacccaggaaaaggcattcagtaaattctcaaggcctctgctcatttctgcaatgaggaaattggacagataaactctaaagtcaattggaactctgatttgctaccttgattaaaaaaaatgccaaagatgatgatttctcttcagttttagtaagtctaatttacaaagaaaaacagcaacatgaaatcatttcgttgtgggaattctttggtctgccatttagaaattaaataaaagttaaaaatacaagaatgccttgttgcattaactttatattatagaatgaatagcttaaatgttgttcttattgttgtcaatatttatacttgtttgtgtaattaatatgataaatagaaattggaataaagtaacggtttgaattacagattttttctttgcttttgaagagaagaaataatttttaaggacattaaatttatatatgcatatataactattgcaaaatgtagttgatatttctactatatctttgaatattgaccactttaataaataattggcatatttttatcctgattttttttgtacttaaaatgctacaaattgttttttattggtagcccagtattactgtaaacacaaaatacaatcattgtatttgaagacatatttcgtaagaatccttttataattttagctttttatatttaatagttggtgtttttaaggaacttattgctccttctttttcaattgcccccccaccactgccaaacttaataaaattatcacttacaataatcagtggaaaaatattaacagtaggataattttaacaatcttagtttaggaaacaaaatattaagatatttggccattttcaatatgaattgtaatactcctatctgaaaaaaatctgtgatagtttatatatttaaattttttcaataataagaaaaaagagtaaataaaatagggaaactcttgttcacttaacctctgtgtaatcatatgcaaaatttatctttgatcagataagtattttgaaatgtagtagatatgccaaagctagttgcttcatgaaattatatttaaattattttaatatgaattcagttaaaaactgaattgtgtggatagacacagaaaatatattgacattccttgttacactctgaaaaatcgtatttcacacctgccttctattagccatgtttcaaacataacaagaaatactgggaaatcattacataaaaacatacaaatttagagaaagatctgatagttcaatgatgtaattatcacttatttattgaacatcaatggtatatacctagtgctgtgctaggtgttttgcttatgcttttcatttagccatcacggcaaacctataatggaactgcgtctcattgaggcgatctgtgtcctttatttagtaaagtggaaaaattatggtttggactcatgtttatttagtctaggccaaattatctttagacttattaacaaataaatttaacaaaataaggtctggaattcaggtctttggatcttccgctatttttttccttctcctcctcctccacttcctccccctctttatttttttaaaaactactttttttatagcaaatttaagttcacagcaaaattgggagaaaagtacagatttcctatctacccctttccctcacacatgcatagcctcccccaatatcatcatcacccaacagagtagtatatttgttataattaataaacatatattgaaacatcagtatcacccagaatccatgattcatattaaagtttactcttggtattgtacattagacaaatatataatgacctgtgttaccattatagtattatacagagaagttttactgccctacacatcctctgtgctccaacccctgggaaccagtgattgttttactgtccctgtggttttgccttttctagaatgttatattgttggagtcatacagcatgtagacttttcaggttggcttctttcacttagtaatatggatttaagtttcttacatgtcttttcatggcttgatggctcatttcttttaagtgctgaatagcattccattgtctgaatgtaccacagtttatccattcagctactgatgaacatcttagttgcttccaagttttggcagttatgaagaaaactgctatacatttccatgggtagattcttgtgtgaacttaagttttcaactcctttgggtaaatactaataagtgtgattgatggatcatatgacatttgtttagttttataagaaaccaccaaactgtcttccaaagtgttttattttgcattcccaccagaaatgagtgagagttcctgctgcttcacatcctcactagcatttggtgttgtcaatgttctggattttggccgtcctaatagatttgtagtggcatttcattgtaactataatttgaattcccctgatgacatatgatgtggaaatatgcatcttttcatatgcttatatgtcttcagtatatctgttttggtgaggtatctgttaaggtctttgaccccagttttaaaaaccagattcaatgccatccccatcaagctaccaatgactttcttcacagaattggaaataactactttaaagttcatatggaaccaaaaaagggcctgcattgccaagacaatcctaagccaaaagaacaaagctggaggcatcacactacctgactacaagctatactacaaggctacagtaaccaaaacagcatggtactggtacaaaaacagagatatagaccaatggaacagaacagagccctcagaaataataccacacatctacaaccatgtgatctttgacaaacctgacaaaaacaagaaatggggaaaggattgcctatttaataaatagtgctgggaaaactggctagccatatgtagaaagctgaaactggatccctttcttacaccttatacaaaaattaattcaagatggattaaagactgacatgttagacctaaaactgtaaaaaccctagaagaaaacctaggcaataccattcaggacataggcatggacaaggacttcatgtcgaaaacaccaaaagcaatggcaacaaaagccaaaattggcaagtgggatctaattaaactaaagagcttctgcacagcaaaagaaatctaccatcagagtgaacaggcaacctacaaaatgggagaaaagttttgcaatctactcatctgacaaagggctaatatccagaatctacaaagaactcaaacaaatttacaagaaaaaaacaaataaccccatcaacaagtgggcgaaggatatgaacagacacttctcaaaagaagatatttatgcagccaacaggcacatgaaaaaatgttcatcgtcactggccatcagagaaatgcaaaccaaaaccgcaatgagataccatctcacaccagttagaatggcgatcattaaaaagtcaggaaacagcagtgctggagaggatgtggagaaatgggaacacttttacactgttggtgggactgtaaactagttcaacaattgtggaagacggtgcggcggttgctcaaggatctggaactagaaataccatttgacccagccatcctgttacttggtatatacccaaaggattataaatcatgctgctataaagacacatgcacacgtatgttcattgcggcactattcacaatagcaaagacttggaaccaacccaaatgtccatcaatgatagactggattaagaaaatgtggcacatatacaccatggaatactatgcagccataaaaaagggtgagttcatgtcctttgtagggacatggatgaagctggaaaccatcattctcagcaaactatctcaaggacaaaaaaccaaattctgcatattctcactcacaggtgggaattgaacatgagaacacttggacacaggaaggagaacatcacacaccagggtctgtcgtggggcagggggagaggggagggatagcatcaggagatacacctcatgtaaatgatgagttaatgggtgcagcacaccaacatggcacatgtatacatatgtaacaaacctgcacgttgtgcacaggtaccctagatcttaaagtataattaaaaaaaaaaaaaaaacaggttgtttgttttcttgttgagttttaagagttctttgtaaacttcggatgatgattgtgtcttctgtaaatatttctgctagtctgtggtttgtcttctcactcttttgacactgctttacagggcagaagtttttaatttttatgaagtccagcttatcaattatttattttatacatcatgtctttagtgttgtgtctatttttatttatatatttgttgcatgtagatgtccagctcgtctcgcactatttgttgaaaagttgatctttgcttcattgtattgcctttgcttcttcaacagatatcaattgactatattagtatgggtctacttctgggctctctattctgttccactgattattttcccattttttcaccaaccccacactgtcttgattactgttttgattacatgacttacttcatgtaggtcataaagctgtgttgtgtcagtcctccaattttgtacttcttcaatattctgttggcaatttaggtcttttgactcttcatataaagtttaaaattagtttgttgatatccacaaaataacttcctggattttgattgagattgctctttctaaaaaaaattatttggctcctctgcttctcccttccctatgcccaaacttgcaatataaataagaattattcttcaatattacacttgtttcttctatctgtggcagggatataaactctcgtgaaactgggagagggagtggtcttgtgaaacaaataatgatttataaattttatggtaaaattatgaatttggcaaataataagttgttatatgtaacttgagctctttatatacatacatgtttttaggtttagaagagtttaataactttataataaaacaataaattcccttgtttggttttgttttctggaacaaacttaaaagcagaaatttattaaaaaacaaaagaatatatcttcaggtcaatgaatactgatgtaatttttaataaattatatttataacacttttgccaattatagcttataatgaagatttaatatcatctataactgatacaaaatattaaacgatgctcataattctccaattatcaagtaaattaaagaagaatagcagggttttgaacaaaatattttatctgattatatcctcgggaactttccatatctatgtctatacagctagtcacagacacacacaactctgttctagcatacatgtgtttatagagcttagctccatattaggaagagtatgtttacatataaataattgaatatacccttctccatttctagtgtggatatatgtgtgtgtatacatacacacacacccacacatgcctagaaacttctcagtttcttacattgtgtaaattgtaataccatgatgcaaatccagtttaactgcaaaatttttaattacaccataggacctaattaataaacgtactccttgtatctaatcacagaccaactaaacaaataaacaaaaaccgaagagcaaaacccaattactgtcccctattcctctccctattttgcaacacaaacacatttgagatgggaaaggaaagcccgcaaggcgttcctttgcaatgacacaggagtaactaattaaactgcacctctcatcctctctgcccccagcactaagactcaacaaatcacagttcgaggaaaaggcctggaattacgcatgctcacaatgatccctgctcagctttgggcttgccaaagttttgatttctactactttactgagtagatccttgtattagtttcctgtggcttctgtaacaaattaccacaaatttggtggcttaaaacaatagaaatttaacttctcacagtactggagggcagaaatctctatcattgggctggaatcaaggtgtcagcagtactgtacgtcttccagaggctgtagggatatccattcctttccttttctagcttatggtggatgccagcattctttcttttgcttgaggccacatcaaccattctgtatgttaatctaccaccatgtaaaatgcattggatatttgagaagtaatatacaagtagttaaacttgtgaacttatgaaatgtgtggaacaagtggatttttgcatacccatttctgtctttacctttacactacacagttttcattcttacattcaaccatatatttattgagcccctactttgtttgtacctggcactatttcctagccatctgccagttgtgtagtaagcctgagtcagaggctgcgaatagcttagtgagaatgtttaaattatagtggtagtaagcataatgaggcagaagagcaagctcattgcagaaagacaggtttaagttttagttctggctctgctcctcattaattgtgtaagcttatataaactatgctatctctctgagcctctactgaataagaaaaataatactgactttactaaaacttacagtgaagatgaaaagagttttgtatatggagtaaatagcatacttgcttatgactctgtgtaaacttccttcctgtgcttggttgttgagtggtggaggagaacatagagaagctccaaatcattttccctgcttccattctttacatgcacagtaggatttttaaaactgcaaattgctcacatagtatcttatgagttagtgtattacaactgaatttaaaaatgaaatatactaaaataggattttttaaaaaattggagtgtatttcagatatgagtaaaaattgatttgtgaaatttttattactatctgttaataaatctatgtatgtactgtgtggtcatttaaatggatgtattcattgcaatactgatcatttcccttttttgattaaagcacacgtttagatctctgatctttaagatcaagcttgacccttaacaaggcatggaggatgttcctcattgagcccttacttatttctgtggccttgtctcctgccactgcctttctccagatttcaggatttgtgctctggagctccttctgcctgatgccttctacccatgttcttcaaactgatttgaaggctactaaccttttgagcagtttcacagtgataaacaatgggaagttgtggagaaagatttaaatgagagtcaattcaacattcctggctattctgatctcttaaagatccctcaacctacgctgtttctcaaccatgcccagttcacatatagctccttcccgcgttcacctcgtaccacatcccctccttcagcaaaaccttcctaacctctcagggactaactcaggcttcccttaaagcagcaaaatgtgggggttaggaacatgggctctgagtgaccttgggcatagcaattcagttctgtgatcaacacttttataataaattggtatagtaatgacaacttcgaaataacatatctttgttactatgttaggtaggtcttagttactaataactttctcctttcctagtctttttggcctctgatcagaaatagacccttctggacagctgcagtggctcacacctataatcccagcactttgagaggccaagcatggtagatcacttgaggtcaggagtccaagaccagcctggccaatatggtgaaaccacatctctactaaaaatacaaaaattaacctagcatggtggtgcacacctgtagtcctagttacccaggaggctgaggcaggaggatcgtttgagcccaggaggtggaggttgtaatgagccaagattgtgctactgcatgccagcctgggcaatgggagtaaaaccctgtctcgaaaaaagaaaagaaaagaaagaaaaaagaaatagacccttctgcattcttttctaggagtctgtgtttctgtgtcataatatttattgcattaaattggaattacctcccttgcctgtaaaactatatactttttagggcttggaaatgtcttgatgaaccaataattgttaaatgaatgaaggaaaacaagcatcctacaaattttaaccaaagcaaaaatattactgtattttactttaactctccagaaaaaatttatgtctagttaaaatcttaggataaattctatgtaattacttgaattcagtgttaggattggcatttgctgaaactaaaacatcttatctattttttaattgaaaatttattaatttaatttatgtaatggcgctagtattacatgtttaatgtgaaaaatgagaagtatagttcatgaaaaatagcacaagtcacaaaagaatctaccttcccgaaatatccaaagttaggattggtttacgtttttctagacattctctatgtatgattggcaacagcaatatctagcactttagccattttctaacttggatgcatttcttatggagagagaaataaatctttgaggtattatacctgctatctggtttatgattatttaactttttacattgtagcagggtttgagtccaatgggcaacacagtgttttaaatccaaggtcaaagtcagctctataagcataactgcagaaggtaaggactggagcgatcacttctcaagcatccttgtgaacagttttccttatagttgctctggttggtatgccctgttcctccttctgatgcttgtctaaccttatataaaatccaacttatttatttatttatttatttatttatttatttgagacagagtctcactctgtcacccaggctggagggcagttgtgtgatctcggctcactgcaacctcctcctcccgggttcaagccgaatctcctgcctcagcctccagagtagctgggattacaggcacatgcgaccacacccagctgatttttgtatttttagtagagacagggtttcaccatgttggccaggctggtctcagactcctgacctcaggtgatctgcccacctcagcctcccaaggtgctgggattacaggcgtgagccaccacacccaggcccaacttagcttttaagtctaaatgacacttttatgaagctttctctgtatctgtagtggaaattaataactccattctcctcgctgctctacagagttgtttataattctctttggaatttatcatgttatgccttgcattatgacaatttataaatcttttctgtctcctcagctattttacaagctcacaaaggcaaagatcttatcattcatttttatatcccttcaccattgagcagagctctttgaccataataaacagtctatagttgctgaatgaattaatcacttagtgttaagtgttgtgccatggtttagatttaatcacaaactataaggaggttattaatcatatcttggtatttagtaccaaactgtaatgttcattaactatccataagtgtaaaaaaatgtgaatagacaagatattactttgttgatattgtgatagattcttccaattacatgtcctgaaacatgttatatttgcagtaaaaaatgctaaaaggctggctgtaataaaacacacagcttaaaatgtatgagttcaataaagagctatgctaattaaaagcactacatttttagaatagtttattcatcactgaaatgaataactatcagtatttttttttttgagacagagtcttgctctgtccccctggctggagtgtagtggggtgatctcggctcgctgcaacctttgcctcgcaggttcaagtgattctcgtgccttagcctccctggagtagctgggattacagaagcctgccaccatgtctggctaatttttgtatttttagtagagacagactttgccatgttggccaggctggtttcgaactccttacctcaggttgtctgcccgccttggcctccctaagtgctgggattacaggcgtgagccacgtgccctgccaatatcagtgtttctaatacacactctatggttgatatgtcaagaacacgtgttaactctcaggtttaacaaaataattgtagttaaaaatacactggtaagtgtcttgagttttcatatgtgaaggtgatgaaaattcttcctcttctcatctgaaacccaatttgtaatttagcaatcagacatgtttatatttagcaagtatgtaagggtcagtataaatatacagctatgaaaatagacaatcagaaaaattctgccttgaaaaatttctgttccatttttcatgtgagtagttgaaataattcagtgctctttagaatatatgaaaatagtggctgtgtctcgaaattgatctctgtagcacagagcacattttcaggcataaaataagtttaataaatgtgtgatgagtgaataaataaatagtgtgtttgatagaacatgaaacaatggtagtgttacaggatgctaatattaagtatataggtagaaactactcaattctaaaaatatggaccaatttctattacatttgtttagtttctataataaagaaaataacagtccatttgaagaattactctaacaaaactgtttttctttagggcattatgataagattaagtattttgatgaaatcccaaaacctcaaggctcaatgtatccatgcatttggatacttctgaaaataatgactagatctagctctcagaaacttttcattttattttcattacacagccaacatttttatagttatcaagccatgcttaaatttaacatgaaaaagagagagaaagtaggtgttccatgccaataaaagataaaccacaagtagaaaagaagggcccaagaaattgtgcttgacattaaattgtgcctgacataataatagcaagtaaatgtcctgaggtgactgtccataagctacagatttgactgttacctgagccaaatgagaaatgtggtgtccgttgaaatcataatgaatttctttgtattactgctataaaggaatacgtgttttaatatcacaggaataacacatgaattatatagtattatggtccaaataagaaaaatataatgtattactctagtgtgaacagtgcaattccagcaacgacatggtattaaactgaaattatctgcagttagtttctttgaagaacatagttggaagttgtaatttacaagttttgctacaaattggaatcacctgcagatttgtaatgtataatgaaactggcttctatctgctgacattctgattaaacttttgagttcgtaaatgtaaattgggctctatgggtttaaaagatcctcggttaattcttaagtgtagtagagtttaagaaatactagattaaaaatttgggaactgagtttactgggatacagataattctcaggaaactctgtgtaataccaaaagtgaaaggggctatgatgtgaaatggcatcatttataccattatagcattgttaccctccattaatattaaaaactgttataataacaaaaggtattttttgttgttgtgagttattgaatccctactatgtacattgtattgtgctaagtgttttacatgtaaaatttaactgactcttctaagtaattatacatattatctgcttttaatttttcttaaattgaaaaaatcagctaaaatgattattatgggccccaccatcatggaatttttttgaaatcatttatttctattaatcccaaaatataatggtaacaaattttccccacacatcatttcaatttttatggactattgatttttctaaatgttaattaaaagctcaaaacttgactaaccccttggcacttccatttctcactcatttgcctgttgtgatcgtgttttggttttctattctcatcaacatcttttctactccagagtagtatattcctccctgacccgacaaaaaaaaaaaaaaaaaaaaaaaaaaaagaccaaaaactaagttttggacatatagcaggccaaatgctattacagattataactgatgctatgtctaaatttattaattcattcagatagtcaacagtaatgcattaagcattgattgtgcctggccatggtgtgaggtcctgggggtaggagggtaaatgtgagaagagagacatcagctcccaccagcagacatgagttcatgtatatcagaggagaggcttaggatgccatagaagtaagtcagctcatcagggtcaatgttcaggagacataattaatttgactactaatattatttccaattagggtttaattatttctcttttttatttgactgcttcaagcatgaaaacactattttattcttgctgtagttcatttgtttcctcagcaattgtttatagatcacctaagtcatacatttagactggggagagagcagtagccaaaattaaaaagaatcaatagggagtatacattctggccagtcatatatatatatatacacacacacacacacacacatatacataaacacatatatatataacacattaaagtatatatcatgatgtatactgtaatatatgtaacacatatgatatagactttaataacacatagcatatattacctataatatataacatatatgtaatgtatgtaatatactattatatatactttaacaatgtttatacatattagcattacatatacgattatattacatatatagtaatatataattaaagtatatgctatatattatatatcatacacatatgtatcatgtatataatatatgcatatatatgatatatacatatgcagtatataaatatacaatacatatatgtaataaaaatgcatacatgtatggtatgtgtaatatacacatatgtatatattacacacatataataatatattgatatttaatatgaacatatcatatattcaatatacatgtgtttaatatattatgtgtatacatgcctatgtcttatgcatgtaatatatgtatatatgtatatgttacatgtatacgcatatatgtatatatgtatatgttacatgtatacgcatatatgtatatatgtatatgttgcatgtatacgcatatatgtatatatgtatatgttacatgtatacgcatatatgtaatataataaatatatactttaataatatattactatatacatatgtctatattacatgcataagacatatttgcaatatataatatatattttaataacaggtattactatatatgtaataatatattaaagtattaaagtatatgtcatatattacatatctgtatgacatatgcaatatacacatatgtatatattacacatatacatatatgtaatataataaatattacacatatacatatatgtaatataataaatatattaatataaatacattatatatttagtataaatgtttactatattatgtatatacatatgtctcatacatgtaatatatgtatatatacatatgtatctattacatgtatgagacatatatgtaatatattaaatatataatatatactttaataatatataactgtatatgtaatatatattattaaagtaaatattatatattatgtatctgtaatatatatatttgaatatatattactatatatgtaatatatattatgcaatatattattacattatatatattacatacatgtaatatatgtaatatatgttatataatataagtaatgtatgttacatatatgtaatatatgattaaagtagactggggagagagtgtagacaaaataaaaaccatcatgaaggttacattctggctggtcctctatgtatacattacacacatacaaacacacacatgtaatatgtaacatatactttaatatttagttcatgtgtgtataatgttatgatatatactttaatatttaatttagatatttgagcatttgctatttgataagcactattatgagcacctttcatgaatttatttatttaattctaaatctaatagtcaactcttagctcttgtcgtacatgacttgttagcagcttttgatagagctcatctttcccttgtgcttaaaatactttcttcaggtggttttctgtaccccatcctctcctgattttcctcatacttcccggtggctttgttcactcttctctgttggttcctcctcttcttcccaaggataatctcctaaggctcaatgtttgttcctcttcttttatgtctacacacttttgttgataatccaccctcaagacttcattcacattaccaaaaaatttgaatttagatctccaccccaacctctcaattgaactccagattgtgtgtcctactgcctacgaaccatctacttttgaatgtttgatggaccagccaacatgtcgaaaaagaaacttccgacttccattcatgatcttttccatctcattggatacagacttcatccttcttgtgattaaagcccaaaaccttggagttattcttgactcttctctttctctcaaatgccatatcttcccatcaatttctctcagaaaacatctggaatctgaccatttctcatcaccttcactgtctcttcactaaccttgttgctacccttgaatatgccccgtactgcataccacctgccacgaaccccaccagaaaagaggcaatgtaggcatggcaatgctctggtcttcttagggcagtgttttacatattgtggattaccatccattaatggaccctgaaatccatctagtagattttaagcaacatctaaatagattaaacagaagacagtacagtgcactaggaagcatcacagtaacctgaatttagtaaggtaaagtattattccgtgaaactttgactccattataattatgtatgtgcatattgggttgtgctattcaatttatttcttgctgtgggtcacagtcaatattttagaaaatattaaggtacatgaagttattctaattaaaatttcacccaaatttttggtgttaaaatatgatttgaattttgttagtttgtttgatatccgattcaaataataatgaaggaaaataaaacagattacaattatttggctcaatttgatggtaaaataacttttatctgtttgtaagttaccaaaaagttttagaggtttttagttaaaaaaattgacattaaatatggaaaaaagcaattaaaacagtgtttgtactaggtctatttataataactgagagatgtttaagggaaatccatattaaaaacaggaatgataaaatctttacaatttcttgaaataaaattcttaaccagagaatatcattttatcattaaaaaatccactcaaattatcttaaagtatgcctctggtgagaaagtgaccatataaatggcatttaacaagatatcttaaaaccacttctttttactgtaaaatgtatagcctagtatatactaacaaatgttattgaatttacagaaggactagaattaagtggggaaaaggtattattttcttgaaagtcatgtttattatgctgatacattgtgagaaaataaattttggtaaactgttaattttaacaataaatgttgaataaataaatgcactttaatgaactagcctttaatagtcatattggaaactgtattcaagtacttattctgtcgctaacttagctactcaggcaataatggggaacataactaactatcttaaattgctggtcctcataatgaatgactataaaagaatagtaaaaatggttgaatgctcctgataaatacatttgaaaataaaaaagaatgtattatcgatcatttgttgttgttgttctccttccccttccttccttccttccttccctccctccctccctccctccttccttccttctccttccttctccttctccttccttctccttctccttccttcttctcctccttctgctcctcctcctccttcctcctccttcaccctccccttcctcctccctcctcctccctcctccctcctcctccctcctcttccctcctcctcctttttctccttctccttcttctttctttccttatccttctccttttcttcttcttctcttttgcattccccttctgattgtggtgcaagttgagagagagagttgtgtctaacactcaatttagaaatcagtttattttatatgctggttaaatggtaggcaaaaatttatcttacaaacttagttacagactcaatgagccttttctggattttcagtgagctaatctgttcatgtataatatgagtaactaaactttaggtaataatatcctattaacattttgtagcaaatcacatttgggtcagaaatcttccttctttctataaaaggcatataattgcattgaaatcaagaactttaggactgctcttgcaaacatttaaaaatattccatcacattatctttcttaatattaggccacaataattatttggcatctttcttttactaatttttaatggatcttaaagaaatacatttacaagaatactgtggatggatagagaacatcaaatttacctcatttcttgttattgttcctcctcttttccttccttatataatcttatagctagcggcagaatgaaatatgaagaaaggaaagaattaatatatatttcagcactgtcgcctcattggatattcagatggtgatctgcagaacaataagatttattatgttatgttgtattcagcatcttcaactctattatttattcattagaataatttcagtaaaacttactttgaagttaattaatataaatttttttttcctcaaaataaatgagtatatcttggctgtggtcatttttaagcaaacagcatatcattgtatattatcaatttttgtataaaattactattttaaaggaacataaatagtttctctattttataaggatagattcttgaatctatttttttcttttcattttctttaagagacattttgaccttgctatgaagctaagctagggaggacattggcagaactctgtgtgtcctcatgcatagctttcgatgagaatttagtaagacagacaataggaccttgccaagttattaattttaaatctcttctttattgtagaatctaaagatttatagaatacccccaaatccagggagatggatcacaaagaattggaactttttagctttctatgctcttacgaatcttagctgtgtcactgctatataatgtcatgatcaaatttttatttttttatttttttgcttttcaccctaaatgaatataaactggtaatcatattgaaaccaatcatttaaaatccatggggcctggcatggtggctcacgcctgtaatcctaaaactttgggaggccaaggcgggtggatcacttgaggtcagtggttcgagaccagtctggccaacatggcaaaacccctctctataaaaatataaaaaattagcggggcgtggtggcgtgcgcctgtagtcccagctacttgggagagtgaggccggagaatcgcttgaacccgagagagggaggttgcagtgagccaagatcgtgccactgcactccagcctgtgtgacggagcaacattctgtctcaaaatcaaaaacacaaacaaacaaacaaaaagtgccttgggaatcacccttttaaaatatcaaacaaaatacctgtatttaatcagcagattattcacctctagaaatacaaatataatttttaaaataagtatttgctatgtttaggatgaaaatatgcttcattttcatgttgtttcaaacctgtctccatctatctatcttttgacgtacttgacaaacactgctggttgaatctaaattacccacatcctaacattctaagactcacacatgcaacaatctcagtctgtatggatgctttcacggggacttatttgcaaaatacaagatccagttttatgttaagtaggtgggttgctaatctgcaagaatgccattctttatcaggcctttatgaattgtttgtaagtaccagctgtacaatgaaagctttatattcattctgcaattagccaaaataattctagttaaactctggttaagacttctagtatgaaatgaatgtaaactattcattctttatcgttctttctggtttcattttggcacatgtatttgttaaaatataatcctctaagttgctttttcactgcttttcatgttgcagattgaaaatgttgatgtctgccttagttttctagcagccagaggggtaaatgttcaaggtctatctgctgaaggtaagaaaaagaatgactgaattgtcacaaatggcatcaatgtttttaaattattttttataatgtaagaaatgtaacattggagtatacgtctccttaatatgataaaggaaattggtgaagtcttcaagacaaccgaaacataaacataatggttattaatatgtgctctaagtatttaaatgttttccatattttgccagaactgttcttttcttaaccaactatatgggagaggagtgaatcaaaaaaatatctttatgttattactagtttatagtataattagatttcttaagtagatgaatagataattagataaatgttggatggacataaatacaggtaaaatattttaattaaggcttaaaatattattttatcaataacatttctataatatattcaagttggtagaaatagtcaaaatagttggtaagtttaagtcactatgaagtcttaaataattagaactaacagcgttaatcactgttatatataaatgttttaaatcattaaagattcaaaagatcatcactaaaattgaaagagagcaaaatggggaaaacttgaacaaattttgacattgatcttttttctgagtttattttactttcacttataaaggtggcaaaagtttgcaaaagcttgctacacttaagataaaatttgccatacttgagaacactgatatttaaatttcttttatatttgcttgttatgatatataattaaattacacatttaatgaccaagaagcttaggttcaaacctaactggtagttctgtaacttcgaataacatttgagtaaaattccccaggataatatgttgctaagtagttacaggctagaaatgctgccatttattcactttttatgtctcttccttatgaaaacctttattaatatcagcctattgattttcattcatctttaaaatatacatgaatgctcaaaatttactctctaaattagttaaacatgcaaaataataaaacaataattttttaaagactctttaaacaaaatctttcaggtttataggagaaaattaacactctctcactgtagcctcagattgatgaagccaactcttcaatatgacgaaaactatgagaaatgtttgggggaaaaatagaacaactcagagggtcattttatattaattattttactgcatagtttgagttatatgataaaccatcagagagcaagaaatccaaagagttggttaattttcctaaactccaaaaggggacataaaaccttaatctcagaggaggatgcattttattgccaacatcaagttttatttaaaatatgattacaggttgtgtagcttattttcaagctttacatccttctcttttcctatttttttaagttataactacaggagaaaaatgtaggcttatgtgtaccctacattgtgaattgaatttttttattcaatatttgaaaatcttacacagcaacttcatctgttagaacaaggatttctgcttattcaattatgttatctgacgtaagctaatcctccttatttattaatatatagcataaattaaaaataaaagaattggaacattaaaaattgatatgtctgcttttggaagatatacctacacatacattttgatatatatggatatatatttggaggatatatacatacataaatatgtataaatgagttggtgagtgggtgatttagaaagaaagttgattgcaacaaatccagttggtattaggaggtgcacccacatcatcaatatttataaatgcaggacaaccaacatttaagtggctttctttctccagttcgtagccactgctatgctggcaacagctgtgtatatttgtgagggaatcaacatgctaaatcaaatggttagcacaagagagagctcatttatttctaagaagcagctaactcgagaaaaattgtagttcaaggtcagcaaagaatatcacttctgagtgtgctttgttctttttaccctctatccttttattctctccctgaaattccaagttatttggaaatgttaacatgtttcagaaattcaggtttgtttgtgattcaactgtgactgagagaattaagttgtatctctgtcttcatagatttatttcaagagaaatgcatctagaatttgttaaaaaggacattaaatacatatgattctttttttgtatttttcatttcatacagaaataagaaatggaaacttaaaagccattctagggctgtttttcagtttatctcgctacaagcagcaacaacaccatcaacaacagtactatcagtccttggtggaacttcagcagcgagttactcacgcttcccctccatcggaagccagccaggccaaaacccagcaagatatgcagtccaggtaaggaaaggaagtagggaatgtgtttccaattagtttgtgtagatacaacttgtttttaacaaattattgtccatgagtttgaaaaacgtactcatgtgcttgtatcagtgtgatgggattatttgacttgtgtaatagaaactaaaaccactcttgttttgcttggacaagcaacatctatcatcttttgggtgacgtattttgtttgttttctaaagattgttgttctgtatcacagtgtgaaatgtctttggtgtaagtaatgtggcatgactactttcttctacaaatgactttagtatttagaatgtgctattgagtcctagtctcctgtcatgtagttatctttcattgatatttttgattaattaagtctgtcagaaatttcaggtctgttaaacataggagtttgaagtttgggaacatagtgtttttgatgtgtgtgtgtgtgtgtgtgtgtgtgtgcatgagtgtgtgtgtgtatgtgtgtatgcacatacatgtattatttgtctggcttgagtcttttggcatatgtagacacagcctggtggagtgctcccaaatcatggcaacttccttttctcttccattattattatttttttccaatatagaattatatcaatcagtgttcaactagaggagtcaagcaagtaaatgatatataacaagagatttattgtgaagaattggtttagcatgattgagcatactggttaggcaagtatgaaatctgaagggcagcccagctggaagggcaggctagaaatctcatcatgagttgaaattgcagtacgcaggtagaatttctcctctgaaggaagcctcagttctgcttttgaaaagccaaactttcggccaggcacgatggctcaagcctgtattcccagcactttgggaggccgaggtggatgtatcacaaggtcaggagttcaagaccagcctggccaagatggtgaaaccccatctctatgaaaaatacaaaaagcagccaggtgtggtgacaggtgcgtgtaatcccagctactctggaggctgaggcagagaattgcttgaaccagggaggcagaggttgcggtgagccaagatccagcctgggtgacagagcgagactctgtctaaagtaaacaaacaaacaaacaaaagaactttctttcaactagttgaatcaagatcacccagattatctaaagtaaactttactgaaagtcaattgattatagacttttattacatccttaaaatatctacatagcaacaactagactagtatttgaaggaataatttagactatagtctaacatagtttacatatcaaaataaatgatcacagaatgaagtttcacttaacaactttcatacaagctactatatttgttcctgaacaatgactggggtattggttagttagctctattacataaatagttatgattatttttcttgaggagagaggatatgaaaatccctttcatcgtctttgaaaatataaacacttgtcaacaaatgtaaatatttaactttgtccaccttagaagtcaagcttgaaacctactaacattcagttaaccttgagtttggtaattagaaatgactcaaacaattaaaataatgttccaaagtacatttatggaccacctcccacttactgtcagttgttcaactgttcagaaatcacttctctttcatctaccaaccaaccctcatatggattttgtttgttactccataataaacaatatttatttctctatacaaccatgtaaatttggttccctttggaagattttcactcatcagtgaatttttaaataaattttaaaaagctatagttttactaaaaacatagcataaaatataaagcttatgaagtgatgggggatattttttattataaaataatgcagatatttgactgttctttaagctcatcttggcttttggttatatcaagtgagattgtataagactcatagtggaaaataaatctctataggctaagtttcttggatgtttgtaagcatatagaagaacaaagtggatgacatcgtgttttatgtgttattattttttgtgtggatgtttgcaacaaagagatggattctgaaaagtgccagaaataatatttactagagtttggtttaagcaatttaaataaagaagacacaagaatagtagctgaaaaaataaaggaaataaaattattttacgtaaagcatgttgactctggaagtgatacggaatatcatttgacattgctttacctcactctttttctgtatcttccatgtgaaatttattgtctagaatttcttgcccagaatttcttggtagttatgacccttttaggaaattgtttattttcctattcttcttgctggatatacatggctgttgtgaaactatggggtagtttaaaatataaagccatgtataatactcatggtttttatactcttttgtggaaggatgtctcgatttttcattacaagtttatgaaaagtattcttttcaacagtgtcctttaaagcctttaaggctgtggtagacttttagcaaaattttctctgctaaattggatttaattactttttgaattgatatataatttaataaatgtttatagagtaacagctttaataaaagtagtattcaggacccgaatatagaagagttcaagtcttacttccattagtcttacttttagagaatttttacatggtttaaaggatatgatatttaagacattaatacttatttttatttatatagatttagtgtatcacattaatatgtaaattagaatttatgtggacttacctgtagcaatcaatattttaaagcatttttcaaaaggccacaatgataatatacataggaacataatgtagtatctatgggttagaaccaagataattaatgcagaaaaattcctagtgacaaatttatcttcatttgctggaggtgtgagtcataaatcatgatttatgatgcctttctattgatttcaaagttctttccaagtaaatagtttaaatctcaacttgctatacttctctgggtatttggccagaaaatgttcttatatttttctctgtagactaataaacatttcttagggcacattgtttcagttcagtgaaagtgtttctgttttattctctttgtttaaagtaaattggcataattctacatatttccacaacatttattttatacattaataatttttaatttgattttgctattttgaaaaaaactccagatgtttttcctcaagttgaatagctttcatttaaacagaaatttggatttaaaggttaacaagtgaaatatacaggagaaaaaataaaacatggaccaagaggaaagaatagagtaagaaattctgctctcctgctctctcagctccctctccacctttgagtgtatgtatctataggtgcatgggtcatgtgctatatgtgagcttgagtgtgtgtgtgtgcacaagtgtgcatgcatgtgtgtcctgctcaagtggcacctagagttctaattattaagagtttacctcaggaatcagactgccaggacctggatctgtattaaagtaaaggtgggattcagattttaagtttcttaaattcattacagggtattatttggcttatttggagtgataaagacttgattaaccaagtaatcaattctttaaaatttaaatatatttgatatgaaaattagattttatctatgtcagtatttttttgatggactttatgtgggtaaagattcaatatcttgctatattccgaaatattaagcatcttatttgcatttatttaatatatgaaataaaactagttcattcagtatttcttaattttctttttattttgaaaaaggtagataaaaattctcctctccagccaaaaggggaaatatgagaagtgttttaatataaaatgctaaaaaaaatcgtatataaatgttggtatcatagttattttccacaggtattcattgggagatgaaggaaatcctatttcttattctaagaaacaatgtaaaaataaatcctacaattttaaaattcataaaattcattttcatcctaggctatttctgtgaaccttactttttcatatgttgcattttgacaattagagttctagttggcaggaaagctaaaagaaaattctatttcaaccctaagcagtacctagcacataccagacaacaacactcagtaaatgaatgcatgattttcctaagaatacctggaaaaacattacagtaaaaaaaaaataaaatgaaacttaatttttcttatgtactgacctggttatatacaaggtgttaggatgatagtacatgtaaaagatacatttttttatttgctaaaagcttttttaaaagacgtgatttttcttaaaatacatacttttatcttaatttttgaacagattattaaatgattttccttcctgttatcaaatagttgatgaattttaccaactcacagatagtggttattaaatcacatgaatagtttatgtagtatacaattaaaacatgtaaaaagaagaaaattgaatgtgaaagtagaggtaagagattacatagatagatgatagaggtggcaaaaccagtggtgataaatctttctgaattaaaaaaaaatatattgggaacttgaaagtttatgatctctgcagatgatcatatgcccttttgcttttgattttatgggagcaaatcaagaatgtgtccactttcaaagatgaacgtgctcctacaggattcacaagttaaactgtgaaatccccgggtacacgttttctgaacggcttggctgttcccttgcagcccctttccaaggttcccgtgacccctaccacacacattgcttttggaaccctcttaccatagaggacatttgccttccagggtatcttttccaggaaacattatttccttctgggagattcactctgaaactgggacagtttacagctttttggccaaaggttataaatcttgagaagtatataaggaagtttaatttaagatgacaggtaggctttagtaatttaagcccttgtgaacctggcttcaattagttgcctaactcagttctgtgttgtggccatagtgtgccctttaaaaaaaaagtcagttaatcgattaaactttaaataaaacaaaaacagaaaagaagagggatatttataaaatcattacttaaagcaggatttttttatctctagagagaaataattgaagagaaagaagttattcttaactgactgcatttggaaaccaagagtatgtaatattaagagaaagtttgtgtgtgcacgtgcacacacttttgttacgttctaacactggtgtttcggttgttatagatgaagattatattatagtaaaggtgggactcagattttaagtttcttaaattcattacaagaaaatatttggctatatttggagtgataaagacttgattaacccagtaatcaatttttaaaaatttaaatatatgtaatataaaataagattttatctatatcagtatttttgttgttttgttttgttttgttttgagatagaatcttgctctgtcacccaggctggagtgcagtggctcagtatcagctcactgcaaactctgcctcccgagttcaagccattctcctgcctcagcctccctagtagctgggattacaggtgcccaccaccacggccagctgtttattattattttttttttttgtaatttttgtggagacatggtttcaccatgttggccatggtggtctcaagctcctagcctcagatgatctgcccgcctcagcctcccaaagtgctgggattataggcctgagccatcattcccagatgctatgtcagtattcttggatgtattttatgtgggtaaagattaaacatcttgctatattggttatttcagagtcaagcaagtatgggttggagtcctgcttgccaattcccagcgcagtggcatggtcaagtgattttaacctgctcaaattccagtgttcttcctctaatattggaatggtgtcaactttctcataagggttttgaagagaccagatgaaatggtttatgtataaaatgcttacttagcataacacagcatataatagacactcaaaccagctatttccatcttcccttctttcacttgaagatcatatcacatgtgtaataaaatacgttgacccacattaaaaaccttaagtcaacctcattactgttctcccttttctctctttctctaatcaagtctgcccattccactgtttaattaaatatatgaaaataatttaaagtaataatatttccaataaaatagcttaataatgctcagtcctttgtatgcccagtctaaataagcagaataacccctttaattagtttagatttttttaattagttacttccatatagctaaatagaatgctcctaccactagtttctattcatcaatttgaccattttcattggattcacacatctctatttctctccaccctcattaattgattctacaaacttttattaagcacgtagtatgttctagacaatcttctagtcactggagatatgcagaagacaaaagagattaaaaaatctttgctttcttgaagctttcattctagtaattggagataacacaaacttaattaaaatatttaccagtaatttgacagctgatgacggagaaaaataaatcagaaaaaggcaaatcagatgtgtgggaacaattttttgctaatttaaatttaatgaggaccgaggaaagtcctcattcagatgatgagactaaacaaagaaaatgacagaatgttgtcggtgaatatctcagggcagtgtttcaggctgagagaagaaatgctcttagaccttgaattaagagcctgtctgcttctcttcaagaagagaaaacatctatcccagttgcgctggatcagagggaaagaggcagaagaagagtagatataattcaaagaaacataagaataagtatggccctgttgccattgtaaagactttgacttttattcctggagagaggggaagatactatgtgccatgaggaacataaacaggcacataaatgaagtggtcatattggctgctgtgttgaaaatagagtgtagtagggaaaaggtggtagcaagaagtcatggaaaaagcttgggctatcatgttgaaagtgcagagaggaagttaaatgccaaatgtgttttgaaggtagtgtcagaagaaactgatagacttgtaatgaaattggtaaacagaaaggaaactctagcatggataaggaggctataaaggtgagactgtacgttatcgatatagtattagctgttggaaagatggcgtttccatttgctgaaatgaagaaaaaaatatgaggaaaggtttggtagggagaaggtcagatattcacttattgccatgtgagctttgaaatatatatgagatatatccaaaatactgaggaggccattggaattgcaaaactggggtttaagggacagatggagcctatagataaaaatcatggaaaaataagcagatagcaacaataaaaagctataaggctagacatgattaagtcaccaaaatctgtacatagttgaagaagagaactgaggccttggatcaggagcttaccaatatttagagatcaaggagatggcaagacctgatagaggagaccaaaaagagttagcctgtaacgtaggaagaaaagtagaacttgatgtcctggaaagcaggtgcagaaagcgttcaatggagagacagatcaatagtcataacttatatggagccctttctgaaccattctaaatagtttatacatacatttactgtctcaatcctcacggcaatcctatgatgtgtatactgtattctttctttctttctttctttctttttttcttttttttttttttttttgagacggagtcttactctgtcaccaggctggagtgcagaggcgtgatctcagcttggctcactgcaaccttcccctcccgggttcaagtgattctcctgcctcagcctcccgagtagctgggactacaggcacacgccaccacatctggctaatttttgtatttttagtagagacagggtttcaccatgttggcaaggatggtctcgatcttgacctcatgatctgcctgcctcggcctcccaaagttctgggattacaggcgtgagccaccacacccggcctgtactgtattctcaatattaattttgacataaggaaacagaaaatggaaagatcaattaaattgcacagtttcacagagactaggctgtatattggatcaaggcaatctagtacagagtttgtgtttctatccattatttacagaatgtcaactacatgaaatgttgcatgtaagtaggatgaggactgataactgacttaccgcttttgcactggagactttgatgagagctctttcagtgaagtagttgctatgataacttgattggaatctgtacaaaagagaatgagagggaggaattacagagagagatgtacaatttgtatgtgtcaattaaaaaaagagatagcaaatataggcaggtctttctaggagtgttactaacatagttacactccactatctttagttcttttattggttaactttgtacctttatataatggaataacatctttatttctttttcaatcacctgtagagtatcttttggtattcgattttgtaaaacctggatattaaaactacggtttggttctcctccatccactaacaatttccaatctctgttatcggcacttttatttttttgttaccaatgttcatatgattaatctattttgtacaggtagctgattcttccatgcttttagtataggttgattccaaaagttgaaaatcaataagagtgtttagataggagatatatatatacacacacacacacacacacgcgcacacacacacacacacacacacacacactctcttcagaatcaagtaatatactctgattcttccctagttaaggcctatctgaaaatctgaaagtctggtaaaagttgatacttgtttgaattgatgcataaaatagtagataatttgaattagggccagagctcattttatgatagtttggggagatcagtccaagtaaacaaaggatcactgtatgccagttacgtaaaaaatgccttttttacgggattatccagttattatagtttaaaatgctttttatgttcagatcgttggttttggtttagttttgtttgtaaaaaaaaaattcttagttttacttttcttaactaagtcagaatcagttaaacttgattttctaggtataaaataaaaacgtcataattgtcttttatctttccaaaagaactgtgagaatataaatacatttgaaagtatgagattaactcttaatttaagaacttaagacacactttttgccataaatatgtagataacaacaatggtgagccattatttgtcctatgaaatattttttaagatgtgaagtgttattataatacagctgtgactcatgataactaatttgtgattaatttatttaaaattttataacaggacattttgacggcctagttagatattttctatcaaacactagaaatttgattctaaccacaggtactacgtatttgacatgtatgagccactttcttctcaaatagagcactgattatatatgtaattatttcatttgccattttatactatatgaaattatttattaatcttttctactaaagactaacatcaaaaagttaacatttattaaaaattttcaaaaattttcaaaacttattaaagtcaatagctattgaatttattcatctgttttctactaaaaactaacctcatctcaattttttgaggttagtctttataaaaaagcagattaataaagtcaatatttataattttgaataaatttttaaaattataattaataaagtcagtaactattaacttttcataatcccttttctatgcttctacttctgaccatcccaaatgcccctgtctttctgattgatctctcagtctaataagatataaaacaaaataacgattgactgtattcattacaattttcaatatggagtaaaattacatctcaatacattcagagcttcagcctcaaaatgttgaggttagttttcactagaaaacatattaataattatggaccttttttccattataagtcagtaatttttcaaattacttataatttttcaaatttcaaatttgaaaaattactgacataataaaaactgcaactgtctcaaaaatcataattgtctgggcatgatagctcatgcctgtaatcccagaactttgagaggccaaggcaggagatcacctgaggtcaggagttccagaccagcctggtcaacactgtgagacctactctctacaaaaaatacaatacaaaaaaaaaaaaaaaaagttagccagaagtggtggtgtgtgcctgctgtcctggttacttgggaggttgaggtgggaggatggcttgaaactaagacgtcaaggctgcagtgagccataattgcaccactacattccagcctggtcacagagattcctcctctgaaatatatatatagaaaaaaatacactaaaaataaaaaagctataatgattatgtcagaatgatcattagattatttttctgtagccaagtctacatggaaaatcaggagataacttggtgagcatggaattagatttaggggatttgcatgtttcagtaacttatcttgcttatgagactttaaccattagtcaagggcacactttcaacatacacctctttatgtgcccttttctatgcttctacttctgaccaccccaagtgcctccctctttctgactgatctctcagtctcataagatgtgaaacgaaaaaaaaaaaagaaaaaaaaaaaaaagccttctctttctgctgtgtggcaggctctagaacaacgctcacccatcagagatgttttgtgaccccagtcactgcttactaatattgttactgaaatgccagagatttggtctaggtcctgctgtgtgctacacagaaagccacttactgagagaacgagtattgccagagaaaaaggctttaactgggtgctgcagctgaggagaagggataccagtctcaaatccaactaaaattaggggtttatatggcaaggaagaaatgtaactatgtgtgggaaaacaggaatgagggagggataaggaagaggaattggtcaacaggaagcaggtggtcagttaagcaatcatgacagatgaggggcttggcgtcttattgtccagatataattatctgataagtttcagttccttgacactatttgggttgcctgatggttggtttcccaagaaaaaaacccagataagacaaccgtaagtttctcaagttttaagactggaggggtcaatttctatgtttattcaaaagaaaccataaacgtcagttctatgggacaattgggctggtttgattatgattgtattgatgattatattttctttgcattaaatggagagcagcccaattataaggacttgatagactagattttctcacaaatcttcacatactttatagatattcatcttttaaatgtaataaaagttattttcctgaatatatgtattaagaaataatttaacatattttatgatgactacaatgctttttaagtatttagaagtattaaataatctgatttttcactgatctgtgtggtctttgcctaagttggtttaaatttttagtttgacaaaataactttttctaccagtattcaagttccaatttttttaaggtggttgcattcaaatgaacttttggaatgaagctctgaatgtattgagatgtaattttactccaaactaaaaattgaaaatgggaaacatccacagaacagcattgtagcgtagtactttgagctatgtgtaagtaacagcattgtggaaaatctaatttatggtgatattgtaaaagaaatatgagcctcatttcctgaattctcctttatcttgaagtttgacattcctaaaagagcaagagactttgatgctgtaatatcttacacaggcctctccctctttagttactgttttgagatcccacaaaagcagaccatgcaggtggccttattaactgcctgtggaaatttaagataagacagaggttataacatattttcataccgtatttcactaaaaggataagttatcacagtaacctgtcccaaatgcaattcagatgatatttcagccacccggttactaaaaagaaacacatgtggataaaagctgtttctgacttatttatggattaggcaataactgttttcagtgaactcttagcaaaaggagaacgtattttatgatatactctgcagtgaggacactttttgcaaaatgcctttaatattttttaaggaccacatatagttttgaggtactaaagatatatttgcagaagtggctaaatatctctctctttcttagtgctaatagcatgttagttatcattttatagcagttcacaaggatcctgcagaagtctttatactaaagaaagaatttggtttaaggagctctttaaatcttaattctgaatatatggtttcatttctatcccaagcaatcataggacacataaagaaatttatttccatctatctcagtcttaaaaacccttagtgaatgtatttaactgtctttaaagtttgttcttttgtctaaaattccttagcattaaactttaaaaaatatatttaattatagtatatcttgggtactttattcccgattttttttctcaagccattttcagtgaatttgaaaggaaataatttctgtctttttaacataatactgtattatagaagaaaaaattgggaggtaaaaattgcctactaaaactcaaacccaagaaatgccttattttatactctgagttttgtttctttatattcctctttgtttccttgtgaatggtgcttttagaagaaacaaatgtgatatcataattaggcatgcttttttctttctttgggaatcaagagtactacatgtctcactatatacggattctgaatagggatttcttctcttgtgatatgtttatgtgactccaagactgagggtaaatagatagggccagaaacaaggatgattctaaaatgattttctataaaatttcttaatatagatgaagagttataaaaactgatgtaatgtcaaagattgtctttacattctgttttgctttgataaatatagtttattcaactacttttatatcaaatacatctatttaaaaattactgttttctacttgatttttatgttttgatgaaccagccactgtctacttgggcagagtcaatgcataacatatggcttaatgaaagatgatttgttgctattgatcctttatatgttacattagagccgtgtgttcttttccactggtgatttgaaagttcatatgtgacctttccacaaataaattggccctcaccatgagccaagagatacatcagatatgtggctaagataaagtgatgttcctcttcaaatcacccacaatcttatagagtacctaaatatttaagcagatggcttaatagacatgttaattaattcaacaaagcacaagttgctcagtgatcaaagttagagggaagggcacatatgaagggactgacgaaggaaatgccatttcacattcaggaaatgagttatttggctgaggagaaagttaaagtagaaatgggttctgggtatctattgctgctttacaaaagcatcccacaatctaatggcacaaaacagtaaccattttacgatgctcatggattttgtaagccaaagaatcagacgaggcataaagagaatggcttgtccttgttccactatgtccagggcaggcaatggagaaggatggaatggcggggatgtcacaaactggtgagagacagaatatctgtggttaaagaatccacttccaagatgacttcttcactcacaggtctagcagcttaactgaaattcacacggccactccagcatggcagccttagtggtatcatacttctcacatggtagctctagtggttaaagcagcttcaagcccactcagactctaagagatgggtggatagcacaaagatctcacttctcaatggaaggatgatcaatgaatttatcgtatccctgtgttaaaattgtcatagcatataatgagagagaagactggagaaataggcagaggtcagtttgtggaagttgtgaactctatgcctaggagctgggacttatttgctaaatgtaaagtaaaattgctttgagaaatttttaccagaggaaaaatgagactatttataacttagaaatattgccctggtgacagggtagagaaagatgtgctttgggcaggggaatagggatggaccctgctctggtggcaagagaatgaacagtttaatgcttgcagatctgaaagttggactggaacaatgaatttggtgactgattggaagtaagggtaaaagacaatcatcacgtctctactttcattgatgaattgaaatatcatgtatttcagtaagacagaaaatataatatgatagtggaaacagatgggaggaaggaggcagagagaaaaaaagtttagctttggccttcgtaggtttaagattttaatggaactttggtgactagtatgtggctccggagcctaggagagaagccagagccagagatatggacctgggaacattagcttagctatgttttattgattgaaacaatagaaatggaagaaatagctcaggaaaaaagtataaaagtaggggaaagaaaggagagctcaacacaaaactctggggaccacaaacaattacaggtgaagtgaggaaacaaggagaatgagagaatgttctttttgttttgcaatgtactgagttatggtaactttttgctaagttcttaagtgtaaattgtttttctattgagaagtacttcgtcttctgagacattttgttcttgtctttcaaattattcctggaatctagatacaaatgaaatacaaaactctggttgaaatattaaattaactatattgaacatatattcatctaatcactgcaacacaaaacaaaacactaagtcctgaacttaagacacttttggattctgtgcagtgttgagatttatgttttgaaaggctcaccctgtgtgtgttgttttgggaatgctggttctttggtgtcttattgggacagtttctaatgatttcttactgggctaagtcctgtgggacttatgttgttgactttgggaaacaagaataatgaataatatccataaaattttgaaggagaataagacctaattgtatttgatttcaaggaatcacagtcccaaagtaattttaaactgagagaccaagagccacagttaaaagctcagccattgtcctgaaagagccatgcttatgtgctttcaagtaagaataacgtaacatcaaaagtggtaagtgagaaccaagggatgtggtattaggaagacttccaagtgcaggtgtgcagggtaatagcggctaaaattcacacaggattcattagaatatttacagtgcctccagagactgtcaagtatgcatttttttttttttttacctgttatagcacttatctttaccagacacccttctaagtgatctgcaatttggtcctcataaaagcctttaggtagatgtcatcctcatttaacagatgagaaactaggcacagaaagcagttgagctgagatgtgggtagggcagctggctgtagattccttgctattaaccaatgtattcgatgtttactactggcatttcaacatattaattcacagaagataaataatgtcatctatcatttcttcacatctgcaaaatgcttttgtttctctttccaaacttgaatttgatttccattaaatataaaattataggttttttgttttttttttcgagacggagtctcgctctgtcacccatgctggagtgcagaggtgtgatctcagctcactgcaactcccacctcctgggttcaagcgattctcctgcctcagcctcccaagtagctgggattactggcacatgccaccacgttcagctaattttttgtatttttagtacagacagggtttcaacgtgttagccaggatggtcttaatctcctgacctcgtgatccagccacctaggcctcccaaagtgctgggattacaggcgtgagccaccgcgcccagcctatactttttatgaagaatattagttagtatacatggttttaggggttataattctccgaatgaaacagtaacctctgtgggctttaaccaaatttttccaaattaaatctttctgacacagtgccagtacatcggaggtggtcaataaaagtcttttcaatgattaattaattggacaattgcataaatcaatcttcatgtttgtcagaataacgagaacactgaactaagtttagtttctcaatatctatgtctatgtgccactttgaaaaccttaggaatgtgaagctgctttcttatttattcattaattcagtatccaaaagtatttatatactttataagttaatctttagaataacatcagtgatggctcttcactgtcaatactctaaaggtgggattagtcacttctgaatatccattttcccagggtttctatttctttctctactttttttttttgtatgtagacataattgaattggaattttcttttcatacactacacgagcgatgttcaacctcattttcccacactcctttctatgtaactttattgtacgtagaacaactcaaattagaggcccaggatttgtcttagattcttccctttctttcaattcctgtgtccactattttaacttattttaatcatttacttctatttcctgtgcctctgtcttcattcaggcctatataaaatcctgcctgaattttagccatgatttcctatttgatctgttttcagccttgttaacatctcccaacctcatttcttcctcactcttacatatctaaggaaagatctatctaatctgagaaattagtatttcttccgaaattaaatttttttggtagtctcccatgcaatcagaataaataccaaattccttagcaaattgttgtggctttctagattctcacttggaaaaaaactagatgttaaaatattatttttagggctgggcgcggtggctcatgcctgtaatcccagcactttgggaggccaaggcgggtggatcacttgaggtcaggagtttgagactagtctagccaacatggtaaaaccccatctctactaaaaatacaaaagtcagccaggtgtggtggcacgcacccgtaatctaagctacttgggaggctgaggcaggagaatcgcttgaacctgagaggtggaggttgcagtgagccgagatcgtgccactgcactcctgcctgggcgacagagcaaaactccatctcaaataataataataatatttgtagaatgaataagaaaattaaaaatatttataattaccacaataaataagcataagttgaaacaattcaaataccaacttcctcagctgagattttttgtaagaagcttgatagaatccaaagagctaaagtcgatacattatatgaggttgaggtattaggttttggtgatttatagaattctgtatgtgtattatgttgaagcaaatttgattcttgaggttgaaaactaaaactaaggaatgaggtcatatatacatatatatgaccacattttgcatggaagtctgctgttaaaataactataacataaatagaatagtctacaaacatcttacatgaaattattaaaattttcttagctgtgtattgatgaaggcatagagaggagatacaaatacattttaactctcattctaattcctgttgaacaataagggctgtttgaatcctttgcaaggattatgaggctaccataggaattagtagaaaaaaaatgttccatgattgattagtgatgtctgtaatggatgtgggagtggctaattataaattatgttccacatttattagccctgaataaaacattgctaaaaattttaaatgataatatttgcttgtaagactatgagaatagttgcttaaatactataattattttaacctttaaaattgttttgtttactcttgatttctatgtaaagtagattgaagtttttaaatattatttctctgtcaaatggtatattttgaaattagatttgtttgatacttgaagagatcatattctgtatacagattctataatatcttggaaatcttcacaaatctatggagcaataaaaatacttcaattgatatttgatacagacaatatggtacaagagaacggagtacagcttatggaatgttaacaaatttaagttcaaatttcagcactttaatttacaaaatgtataaaatgcacatgagttaacattaaaagacttaattttcatatttgtcagttggttgtatagtataacctttgcaggactgttgtgaggattgagtaagataaattgctgccagttattaaggatgtaataatgactagtgtctttctgttccctcctttaacatacttctgataattctattcttggaacaatttcccttgtttagaaggtagagatataacatgccatcatttgaaaatgccacccagtaaatgtcaatcaattgtttagttactgaacacataccagccccattataggaactaagaatgaaaaaaaaaattaacataacataattcctgccctggagaacaacgcagtctgtttaggagacagatacttaacctgattaattactgcaccatcaagatacagtattcaagacatatcgagatattcagagaggggattctgaagtttaggattgagattggggtttgaaatatacatttgctatacaagaaggaaggagtcgattatatctgggattataatttttagaatatttatggtaacagcgtaaaattttgtgggtggtgacagtgagtgaacctgtatttgggaagcagtagtaatagctgcagatgtggctgttgtgtcaggaacgctaaaatgatgaagtctgtaagaaggaggctgctgacatctaaagaggcatggcttgagattttggaatatgctgtttgactttagaaactgtgagtattctccttccaaggagacatctgtggatattctgtagcacacagtatctccaatgttattatgcataggaatcacctgcggattctgtttaaatgaagattcaaattcagtaagtctgagatgggatctgaggttctatatttctaacaagccccaggtgatgtcagtgttgttggtctacagaccacattttgagtagtgaggctgtagtgattagtaaaaatgtgtaaccacagattcggccctgtttaccttaaaaagctttctttccttacaataaatggattttataactccacatgaggatttacactgaagctgaaataggaagctctggcagtttggatcctgctgtgttttgatcaccagatgaattccatactttaaaaatagttgactgtgtatagttttctcttcttcccttccatgcttgagaaaaataaaaagcagccccttgatattccagtttactagaaagatgatcacatacttcttttagtaggatccacaatgagcctcaaaatgtttacttcttttgtgcttctgtttctgacatcttttgcccaccataaacagtaggagcctgatcatacaggatttcagaaaaaaatgcactcttcaattcagacatctaaaaacccttattttactgcttttctgactcagtttattttcccccattgcctgagagctgtgtctacatgtcacctgtgtctgttttactaggactcggcaagttggctgtgcttactcacctggtttgttactaatatgttataaacttgaaacctgggaaatggtattacaagcactgtggaggataaaatgcttttctgctgtccagtgaggcatagacaataatgttaagaaaaataaaggagctattgagaaagattttgagttacatcaaacaagtaatgagagaaatggggagagattgatcatgtgaaaatttgaaagaaaaataatgagagaaaagtagaggcatattgaaccacaagatttgatatttctgtcctccctctattactagtgatttttaagattacagtaatagcttattttttagataacattgcaaacgttcaactaagcctttcttgctctcttttagacctcttttcaggtgaaaagacaaaaacaaggagaggcaacagacgtttaagagtagtagaaggacataaaaacgggatggcagtaatactataattagaaccagcaattaacaaatgtctcactaacttacacatacatacgtgtgtacagtgcctttacctttgcatggtatttcataaacattaggtattaggccaaaccaaactgtttgcccattgggcttcctatggaagctaaagagctagctaaaaccaaccaaccaaccaaccaaacaaacaaacaaaaataaattggtcttccaaggagtccaagttcttgatctataaacatctgagagtggtagacacttatgtagcaacaggccagtgacttttgactaggtgcctcttagaaatgcagctggtacaatgtattctgttagtagttgagatcatgaaaaataaaggacaaaaatcatgaaattgataagaccagtgggttaattggtgaaataacatttattctctatactggaaaatagatccatggaatggtgaagttgccttataaataaatcaaacataaagaatattctttttgacatactaagcatttgtggcagttatacttggcagataaattactttctaaagggtaatataaataagaatagttcttattctgcttttttaaaacatactaaattccatttaaatttctcatggacccatcaatctgacttaagcattatcacctcacaatttaccttttttaaaatgagtatccaaccattccaagctcctaattccactattgattatttcaaatcagctattcacctcaatttatttaaaacaaattaagtatatatctgtgaaagatagagtttatttttaatatgcttccaatgttattcaaacaccaggggtttagtctaggtcctgctctctgttgcacagaaagccaatcactaaaataacaagaattgcctagggagaaggctttactcagttgctgcagctgacaagaatgggagatcagtctcaaattcacctccccaattaactaaaactgggggtttatatagtggggaaggcatgtggctacatgcagaaaagcaggaattagggaaaggtaaggaagaaaagttggtcaacaggaaataggtcatctgttaggaaaacaggaattagcaatgagtaagaaagtaatcctgacaaatgaaggacctggcatctcattgtctagttgtggcaatctggtaagtttcagttcattgatactatctaagaggcctgatggtcagtttcctgagaaaaggaactcagataaaacaaatgtaagtttctcagattttaaaactgtgaggatcaatttctatgtttattcaaaagaaactataacatcagttttatgggacatttaggccagtttcaacaattcaaaataattatcacactttaaaaattaatattaattgcttagtttcatttaacatccttgtgttaaaattttctcattttctcataaagtttaacagttgtttatttgagtcagaattcaaataagcttctgtacattacaattggttttaagttcttataagactctataggttttcccttcataatttttcttgcaatttatttgttaaagaaattgggtcatttgtcctattgagtgctccactgtctgtttttattattgtatttctgtaatatagatctttgaaaaattgtctctattaattgtgttaataatacacttgctgttacaacacttatggtgctggtttggtgacacatgacatattacattttcaaaatgtattagttttattgtttatttatttttttattttttctgagagagtctcactctgtcgcccaggctggagtgcaatggtgctatcttggctcactgcaacctccgcctcctgggttcaagcaattctcctgcctcagcctccaaagtagctgggattacaggcacgcaccaccaggtctggctaatttttgtatttttagtagagatggggtttcaccatgttggccaggctggtctcaaaatcctgaccacgtgatctacctgcctcagactcccaaagtgctgtgattaccgatgtgagccactgcgcccagcctagttttattttttaagagacaagagtaggcaaatttccaatatctatgatagtattggtacatttgatgaagagattgctttgaagaaatttcattatgtttatacatttaaataactaaagttaaattaaatgttttcattacataaaaagggtacaaagcatagttatgaaagcttagagatttaatatgtgtctagaaggtgataaaatgttgcatagacttggtgtaatttaaggtgatacttgaaaaatggttagaatttggtataatagacacaggtagggggtattcccataggagttatagcatgagtaaaggcacagaaaaatagaaaagtacaagtgagataaaaacccctcttgtcttttatcctgtgacaaagatagtagaacagaaacacagaaacataagaatattttataaggcttggtgcagtgtctcacacttgtaatcccagcactttgggaggccgaggtgagcggatcaagaggtcaggagtttgagaccatcttggccaacatggcgaaacactgcctctactaaaaatacaaaaagtagccagatgtggtggcgggtgcctgtaatcccagctacttgggaggctgaggcaagagaactgcttgaacccaggaggtggaggttgcagtgagccgagattacgccactgcactgggtgacagcaagactccatctcaaaaaaaaaaacgaatattttataaaggatcttgaatatcaaaatttactttgagtcttcactaatcagctgcatgttttagaaaatttattgtatgtctttgacctttgcttccttcacctataatttcacttatctatttgagaataatatcaagacacaagcctagatacattcatttcaattcaaatattcgattctgaagtatgaattagataagcaatacaacatttgaatttctctaggtcagaggtatcgtgggaagtattcaaggcttgagttagcatgataaacatcggaattgatggaaaacataggtacaaatggaattatagatatttaattagtatgactaggtattgatttctcctctgtaataattgaaagggaaatggaaagagtcagctgttgagattttcagcctatattattaggaaaattgtggtcctctggatagaaataaagaaatttaagtaaggagtttattgagagctggagaataaaagaaggagaatggagagtttgatgtggtgagtttgaagctcacgtaaatggacaagtctttcattcagttggtgccgatggatgggaatatgaacagaggttaatttaaggagtagaatattagtttaaatcttagtagcaagtgaattactaagtaaacaatgcataaaatatttgaggaaagaggatatactcttgagggaaaaataccatgcctttaagagatgtggaaacaagcaccccaaaaaggaaagagaaaatgggacaaaaatgatggtgaactaattgggtcagcttactggaatgccataatgcctggtctatgaataggagaggctcaaaaagaggcagggaccaacatggtcaaatacaaagactttagaacacagtgagcattgaagaaaacaagatagcagcttcaccagtgcaagaaagcagaacagaagctgcctttcaagggattacagtgagagggtttggtgtaagaattcaggttcaaagtacagtatccttatataataattcagaaaacacacatggaccataaaatgaaattgattttggccaaatcattcaaactttatggactttgttgtttatccagttctgtgctaagatttatattatggcacgtctttaaaataatgaggtggggggaccagtaaggtggcttcaactcactaaaagaaaatatattgtttcattgtcatctattttgctaatatttgtgttcaatttagagaaagtagggtagacatagtggtaaacagttctcttactcttgaattgacaagtagactgagaatttcacaaaaggcttttcctcactttgagtgtttttattctttaattttcaaaatgctatttcactgaattgagacagtttggtttttatttctgaattactttctgatattattattactgaggtagtttagctagttgtggccagttgttttggtgctcagtgtagttagaatacagattgcattatacacaaataacaatttatcacatgccaaatgtgctctgtgaatctgaaaagctccctctatatgagggtatatttccctcaagccaggcaattttaaggacctgcaagctcccaccaccaactagctcagtgtagtaaaagttaatttagtaaacacatcatcatcctaagtaatcctttccttgactaaaataccctctgcttggcagagaagcaattggatcaactacatcaggactccaagtgatcccaccctgattccaacacccccatgttgttcttgtttccttggaggccttgaaaactgtgcatgcacagcaaccggattcatgtcgagccattccaattcatctgagaagcgattctccacttaggcatcaacccatgaccatcacagggtgtgtgcacatgtcctgggtttatcaggtctaactatatctttcagaatactgattccagaactcttaggtaacgcagagatcagttgaacttaatgtataaatgtgcattttatatataaaatattgctcttcaaaatttggcttaaatcatgctttcttgtgtgcctttgaacaaagattttgatttaaaaaatcattgagaaatgtaattcaagaatgcccagaaattgtcattagtatttgttaagttgtttatgaagaacttaagcccactttaatttctgtttttatatagatcttccccaagacaaaacatcttttattgacttccttgaaaacaatttagtactagagatcagcaataacttattagacagaaaccagattatttaatcatttggctttcgaaataatatttagattgaaaaaagcaaattagaagagtttactaaaggaactaatgactgtcatctcatactcttcttttacattttaaactttttaagaaagtgatctttcatcatgtcagtgaaactttagtttccctgaagtttcacagtcatttacaaggttgaatttttttatatgatgaaataatagtatttttaaaatattaataatattacatggccataattgtaaagtcagtgataacacattttatgacaaggtgtgcactgcattatttcatagtacattcataatcaaaggtcatgttggacatacaacattaccataattttctaattaatttgttctttatacatgtttatacgtgttccaattgcatttcattaattcatagttttcttgtaagtttgtgctttccttccatgttcaaagaatctctttaattcaatttctctgtttctcctcatacagtctggcagccagatatgcaactcagtctaatcacagtggaattgcaaccagtcaaaaaaagcctactaggtcagttaatattctctaatttattgcttattagtgatatgcaaataaatacccagtgatattttgtcctatcttttttttttaatgatgcacttctgaatgagaagtttagagcactaaatttttccaggaagattttcacacatagcctcagggatgagcatgtttgtactagataattaaatgggttttggcatcttttttagttttgtgatatgtagtgctataactgggcttaagtctaggttctaggtttagaatcaatcaaggaaaccattactttgaatgcccaattccttccaagtcacataatctggaagttatacaacaaaattgtaattgctttttgagatgggcatgcattaattattgcacattttaatggagatttgaaaaacattggcagattttagtggggaagttagtaccaggtcagtctggactgttcttctatctataatagtttaatttttttgcttctttatgacacaggtataataaagacagcctgttatagtaaatgatagtgcgttatatactgtttggaaaataatgacctataaaaatgttttgaaagagtttgattttttaaaagtgttaagttgctgaaggcatgatggtagcatggaacagctgaataaaaccacagcaaaagagttttatacctctgattagtatgtgatcctttgtgtcatctcactcactggggaagtatccagcagtggtttattcattactgttccattgatgaatcatattatgcagtgtttgaccacaaagactgcgtctgatgctttgacttgaggtaggtgtctttccccttgccttggctttctaagttatattcatttccagagtagccaaaataattctcgaaagacaaattttaaaaggtatttaattaaaaactagaataaatgatataaattatgatgggtaaggaacagtcacctgccatgcacaatgagcatttttattactccttctaagacttgggcatgtaaaatatttttaagtactgtattttgatagatctctctccctctctctctctcctctctgcttcatctcatttccctttttattactttgatgaataatctgaaggcctgctctgcctgcctgtcaaattagggtaatgagaagagcaaatgtatttttacatttgttttaatttgttcttctaaggactgaagatcatttgacttcatgggttgcagtaaagattaaaatgtattttaattattttctgaaacaggtcaatttgcattacaagcagggcaagttttgtgataaaatttgtttatgtgtgtgagtttggaatgaactttctaagtctatgcctatgtctacagaaatagttctcagatttattatgattaggacacttggccaaattcattagttgggttccttcaacagagtgcaatcactggtcctgtaaattcctagcatctgtcgttattatgctgtacttacaaacccttgtagattctcttaagcaaaagttaaatgctggaatcatttggaaaatattctaatactttgtatgacacaatgtccaattagcaaaatagctaaagggaccaattatcagccatatatatttaaacattaaaatataattcacattttgaagctattaaccgttctaagaaatcaacagttttgtttttaagttagtatttgttttttttcctgatattcactctattttataatgactgttactattataaaagcacttatatttcctgaaggtggtttgattttctaatattctgtgaaaatgatatagtctagtagtattataaaggtgaattaaatgttgagcatgtaacaactggattgtgaaattttggtatatcggatactaatatgagagacattaataatctttgctttaaaattttataagatgattataaaaaatagtgctatatttgtagattttgaattcttgttttcctttcaaataaaaaatttcagagtagtacacagtgacattcacatggtggcagcaaatactaaacaaaactttcaatatcatattttctaaatagatcttagactgtcagtattagttcttggccagacacggtggctcacgcctgtaatcccaacactttgggaggctgaggtgggatcacttgaggtcaggagttcaagaccagcctagccaacacagggaaaccccgtctctatcaaaatacaaagatgagccgggcatgatagcaagtgcctgtaattgtagctactcagaggctgaggcaggagaatcgcttgaaccctggaggcaaaggttgcagtgggctgagattgtgccactgcactctagcctgggcgacagagtgacaccctgtctcaaaaaaaaaaaaaaaaaaaaaaaagaatgtcaatattagttcttcacttctagttcttaatttatagattaaatatacctatagaatatatgtcagtagtataaaatcaaaatctagtaattgcacattttaggcacaatccattacataatcggtcattgaaattttaaagtggaaattgtttaagagtgaaatgaatgatcgaaactgatattttagttcaaataaagcagcagtaagttactacctccagtcaaaccacctctaattataagatagtctgttcatatttcctcatatcctgtccttcatacacaaagagtagctaaagctattgtcactacatgtaagcatattttaaattgtcatccagctaacagtgattttcttctgagatctgcatcctttcttgtcacgtctcctctgtgatcagttggccaaacttgtgagacaaccagctaagtctggatgcttatttttggcaagaaaatgaaaaaggttttttgtggggcagaccagtgaaatataatttaactcatgacctgggtcttggtaccatgttttcattagtgtagctaagtaacttagatactcagtgagcattagctattccttcttgttcagtaactttcttgtgattaatatccaagcaaacttactatataactacctacaataaaaacaaatgccttacacattgaaaagaacagcttaataactgaaatagctgaggaatatgctgagaacataaagttaagtgttattgtttcctttacttttcacataattgttacagtacttttaaggcaaagttttattcatcagggatggggtgagtatgacttttttagttaagatttattttaattattgtatattattacaattttggagggacatgttcattgaaaagggaaacaagatttttctgaagatctgcaacattgtgcttagctatttatttgtcacatctatcaccattttctgctaaatagattttagaacatcatatgttgtaaatttctgactttcagcacctcctgcttcttacctttttgtaatgtacaataatgatgtaatttttcttatactatttcaggcttccagggccctctagggtgcctgctgcaggaagcagcagcaaggtccagggagcctctaatttaaataggagaagtcagagctttaacagcattgacaaaaacaagcctccaaattatgcaaatggaaacgaaaaaggtaagtgtttgttacatcattatgacacaagtccaacatgagtcttgtgaattgcatgctaaatctaatatttgagcagcgtaacaactttgggcctagagatgttatcagtggagtttctttatgtttcctaactgtcccctcctgactgccagctttcttatctgaagaacattttaaacaaataaactcattcattttaaagtagttagttatatatgcaagtacaaatactgtttctcaaaaacaggtccttccaaatgcatgtaaatcacattttcttatgtctttttatgtttttgaaaatgtatcctgaaatcataaagccatattgaatttatctgaatccttaacttcagttaaggtaagagccataagtgtttttgacaattaaggttggagcatcaaaatttgaaacataattacagtaggtttttatctttgcaagcagcagatcccagagatattatgacctcagttttccccaaaagacaaattattcatatttgttttgttttcttgaattagtgcataatataaatatcaaatcacaaaatcaaggacattaaatgaaagtgtctgttaaaggcatattataaatgaatcataagccacacagttctctgtgatgtacgaagtgggcatttaaagaggtgctgatttgatgcttgtcactgagtagcagagaggacggggatgagtatgtgtagtttacacctcaatcatgaggaagtgaagaacttgtgctgttataagtagtatggctgtgtgaggaactagggtgttctgctggattttgaggaagtattttcaaatcaatagaacttcaaacttttcttcagagtgttgggctctacatggaaaaacacatgaaattaaaaagtggcacaaatgtttagttagtagaacatctggctaattgggatcaaataattcaaccatgtgggaacgtttttgctcaaaatagataattgtgaattgtttcatataggcaaatgattagacaacttcctcttcctcaaatgtgaacggacagatgtgatctagaagcaagacactcttttgtgtaaatattccctttggcctaaagcaaaagtggacagactttaaacacctgagagcagagcagtgtgtgttaagattgcaatatcttaagctcttgagttaaatggaaaatgaaaaacaaaagtgtatatttggaagttaggaatgttttctttaaaatataaaataaaattttagatttaagatcacaagaaatattactgaagacttatactcttcctggggctaagggaggtgacagtcgctcatcagaaaaaaaaaaatgccctcatttcctaacttttctaaaaaatattatacaagttcaggctaatacttcctgtatatgtgggaaatttctaggggaagctaacaggcttagaaataaagatgtgttaaatagactaccaaagtgtccaattaagcaacacgataccaccgttattgatattctagcaagaaattactagcaatgtttgtaaatagacttagaaatgcatttgatgaattaacacttttatatcttaatttatctgaatttttctgtaatgtgaaaatgttttatttaacttatttctggcatctattagtaaaattctgatgatatacaagcattaatatttttccatggccactcaattcatacataccttccctatctatgcttagaaggcagtgcaaaattagatagtagcaatattgattataaccacaaggtggagacagatgtcgtgtaatatgcagtctgctcatataaagcacattttcttagacaagagttttcatacgatataataaagacatctggaatttgtcttgtatgcaatatgaaatttgctattaaacgtggagttaaaactttatgtcaatagatccaataacaatgttcataaattaatcattatgtcatgctgtatttccaaaatactatcttaaattataagagcaaacgaggtaataatatattacacttaaaacattttttttttttttttttttttgagacggagtctcactctgtcgcccaggctggagtgcagtggcgcgatctcggctcactgcaagctccgcctcccgggttcacgccattcacctgcctcagcctcccgagtagctgggactacaggcgcccgccaccacgcccggctaattttttgtatttttagtagagacggggtttcaccgtgttagccaggatggtctcgatctcctgacctcgtgatccgcccgcctcggcctcccaaagtgctgggattacaggcgtgagccaccgcgcccggccaaaacattttataaaaatacaaaaaattagcctggcatggtggcgggcgcctgtagtcccagctactcaggaggctgaggcaggagaatggcgtgaacctgggaggcggagcttgcagtgagccaagatcgcgccactgcactccagcctgggcgacagagcgagactgggtctaaaaaaaaaaaaaaaattataagttattctatatccaaatggtacattttttaataaagatgtttgttttaactttttgaatatgaagatttctagttctagaataatgtttataaaaatatacaaatccatctggtgatgagttgacctctatcacaactagtttgcatatataacttgggtgtgaccaagcaaggtgagagttaagaacttttaaaacttactgtattatattgatagaactcagaaagtactaacttgaatattattattctaattgcttttcccttttagttattaaaaataagaatacttaaattaataacaagatcttttactggcaggattaaccaaattatctgtaatgtgttcctcgaatgcttttaagtggaaatatactttatacattctttaacaactctgagaggatgagttacataaatcagttcaggaatctatagaatctgtaatacatagtaaaggtttattcacaattaaaacaatttcacttctatattaaaaaaacaaattgttgaaagtacagtggcttttcatatgtatgatttgtaaaacaaattagcttttttaaagtgatgtgacgcttaatgagaagaaatcagtagagaattacaaactgcacttcaaaagatacatctaatatcattttaataatgaaatttgaaaaaatagtgtgctcgttttacagtctcattaaatgaattaaaatatcagcacacattgtagtaggttatcattggcagagaaggctgaaatagaaacgttacaatgggatgcactgccatctgaacattatgtcgaagtggaacgcggaaacatatttctcagaacaagtggtaaaatgaaaacagcatcatttgtaaagcatttcttttgagagtgcttcagtttcttctcctgatgacctgccattcagaaactgacaatgaataatacactctgacaccagcatttgtcaatttgcccagaaccatatgagagtactctagacagatatatgttccgaagtaaaccaaatacctgttaactgtaaatcaaatcttgtagaaaccatgccatggttcctttggacatatactttgcatgcctgaagcaagttaccttaagaaatcattcttttgttttacaaaacttgtattaaaaaattaaaaatgcaaaaaagcttaatattattaggaatttatccatagctttatttggaatccagtttctttattatgatctataaacatgcatcatttgatggagttccttagtggagaggtgtttttccatgttgctaagaaacatgccccagcaccagaagggatactacctaccatctttttgccatttctcaccgtgattcttacattgtacctgtttactcactgaacagggcttccttctctttgtctagattctaatcaggtgtcttctggtgtggaagctttggcttttatttacacacaacacagaattaataagatagatgccaaggatttagcaacattttaattcaacattatacaggtatcagagttaatgagaattatgcattagtctttaaatttgggcagcttattcagctaaaacatagatgtctagctcttaaacactttgtttttttaattactctgaaattacaataaagtcaaagaactgaactgttttcttttcaagccagtgcaaatgtgctttagttattattttactggtgatctaattatgcattttaatgctttattacttaatacttatataagcctaaaatacgttgttaatgtcataatttcagggattttagtattctttccatgagttaccataactaggtgcatatgtgtaaatatatgtatatatctatatctatatatttatatctatgtatatatcaatttataagactaaatagacttggccatatgtgttgttggtttatgcatacatgcacaaatattgaggtgtccacaaagtatatatgcctgtacataaattacatactggctggtgagtgaatgtaagcttctctaaattgtacaactctccacagagtggcactctaatattgcaaaggtacaatataagcatgtgcagaatgaacagctcttctaggatccctataaaactccaccccatgtttcttttgagtcactataaaattgatgactgaggcaatacacgagcaattatttatgcaaagcagtgtgaggaggtgcatgaggatccacttaataccaagacatatttagatttgactgccacttttcttcaacttaatttttttaaagcatttggtatgttgttgtggaattaaagtcctaattatttatcaaaataagtggcatagccacattgtttaatcattttcctctttccaccacgatctgtgatgcttaaagtatcctatattcagcagggaccatctatatcaatgagcacaatgcctgccatgcaggaaatacttcagaaatgaatggtgcttttgtcatcatttttgttgtcacttattatatttcagagttggaacctagtttacttttgtcaaagcaacgcactattcagtgaggaaaaagagataagcgattaagaatcatctctatgtcctttctcagactgataccactcttggtaacatggtgctaactctacagctaactgaggttccagagagaaatgtcccactataaactttccatatgcctgttgtgactgccacatttacatccatgtattaattttagaacttggttggcattgttcccaagtcatcaatattgtttatttacaagatgagataactagacattagttctgtgaatttagatgttttgcaagtgtgaacgaatatctattctcacatcaactcagaggaacaggtgcaagtaagatgctaaagaagaaggtatataatacctgaataaagtgtcttgtgtgatgttctccccatttatatcctgctcaccaaggaagaaggaaaacaaggagttacccaattaacttgactgtgcgataaatgtggcttgctggagagccatttcagcagaatttctggcatgcagtaaacatgtggaaagaagagacagtgaaaatcttccaaatgtttgagtcagataaaaatgagttccaatttagattttgttttttctaagttttgccatatgtatgattgaaaacaaattatctttctaagttttcattttctcatttttaacaagagagatcataagcatattgtagattattatgggtttaaatgagataccatgtatgaagtacttattatgtacttggaataaagtaagcagtagatgaataatattatttggttatggtggagttggcaatggtgagtgtaggtgaggtataagaagaggaagcagaagacagggagtggaagcaaattgctatttggggaccatagacaagaggtaaggctgtaagcagagatagcccataaaaatgcaagatacaaatccatttttggaatgcctttaaatatgtgcattagaaatctgttattttccccatgctgagattcattcatagtcagaagttgagtaatcaacattcagaaatatgtcattgagaccaggctacttattcctgaatatataaatggcaacgattataatttgtgactacattcattctgtagaaactacaggtgctgccatttcagctgctgttgtgcaatctttactgtgaggagtccagagagactcttattattccagtgccttcctgatgcacaacaacctatgatttgccctcttaatgaaatctgaagcatctcattgcctctgtatagggacaggctgtggacagatttagagcggagcttcaggaagtatcttatatgtgtgtactcgcctgagaatgatgttacagctgctgttatgactattactgtgggttggatgtggatgtcataattcagagtccctcttgtttcagttttgggtgcagtgatgttgaaattcctcttctgtacttgaacttctatagcagtcttctagctaatgtcttcaacttgtttctcttttctaaggaaagagcaccttctcttatgtcccttgttcatcagccagttaaaaaagcatcctgactggttcttttctaccctctccgatcaaccccaccgaagctcccaggcacactcttacttcttaacctagttgtagatgcacagaagatacataacaagtatgtggacaaagagatgagaaaaaatgacattaggggaacctgaagagtttattttggttttagagattatttgaagcaaactgctaaacatccaggtgaactcagagctagccaaggttctgaaagttcagtaaaaaatgttaatattgcatagctatgaaacatttaatgaatttagcaatttgggggactgtgttaagaaacagccctttaaaactgaaaaggccaacagttttcagaatttgtgagtctactcaacccttgctactcaaagtatgacttgtgtgtgagcagcaacggcatcattcagaagattgttggcaatgcagaacctcagggcccactgcagacctgctgtatcacatgtgcatttaacaggatccccaagtatcatgtgtgcacattaaagttttgagaatgactgtggtaaacacttagaatgtttgacattccaagaaaattatagagcttgggctgtagagtgacaagatgtggggtcaaagcctagctccaccatacactcctcattagatacctaaatcattgaatgaagcttactaagctctggtttctacaaatgggaattaggaatatgagcccttcccacttcaatgggctgttgtgaaataatgcagttagagaaccttcaataaaatgtcagttagcataattatatttgtaataattattcatattatattcattatagaataaagcgaaatatcataaataacttttttttttgagagagagtcttgctctgtcatccaggctggagggcagcagtgagatctcagctcactgcaacctctgcttcccgagttcaagcattatacaacatatttttatagggcaaggtggaatatccatttactagcatgggctacagtggtggttggaaaataacaaagagaattgcttagaggagggatagtgttttgttcatctttggatatctgtgactagcaaatttatttgggtaagagtaatttcagaggggaaaataaacacgtccccccacagcccccaccccagaatcaatgcctctcaaacactctgcatttttgaaatatggtaaaaaaaaatcacatcagagaagtgattgatgctgcagtctcttttcagttcagaggagagagacttctatccatcaatagtttggaagttctcaattatgtaatataaatgatcaagattaatcgccttttctttatttttcttctaaacaatgtccagattcctccaaaggacctcaatcgtcttcaggtgtaaatggtaacgtgcagcctcccagtactgctgggcagcctcctgcctctgccatcccttctccaagtgccagcaagccctggcgcagcaagtccatgaatgtcaaacacagtgccacctccaccatgttgactgtaaagcagtcaagtacagccacctcccccacaccatcttcagacagactgaagccacctgtctcagaaggggtcaaaactgctccctcaggacagaaatccatgcttgagaaattcaagctagtcaatgcccggactgctttacgccccccgcagcctcccagttcaggacctagtgatggtgggaaggatgatgatgccttttctgaatctggtgaaatggaaggttttaacagtggtctgaatagtggtggctcaacaaatagcagtcccaaagtgtcacctaagttggcccctccaaaagctggaagcaaaaatctcagcaataaaaagtctttgctacagccaaaggaaaaagaagaaaagaacagggacaaaaataaagtttgcactgaaaaaccagtcaaagaagagaaggatcaggtgacagagatggctccaaaaaagacctccaaaattgcaagcttgatccctaagggcagcaagacaacagcagctaagaaggaaagcttaattccgtcttccagtggtattccaaaaccaggctctaaagttccaacagtaaagcaaaccatttcacctggcagcacagcaagcaaagagtctgagaaattcaggactaccaaggggagcccttcccagtccttatctaagcctataaccatggagaaagcaagtgcttctagttgtcctgcccctttggaaggaagggaagctggccaagcttctccttctggttcctgtaccatgacagtggcacaaagcagtgggcagagcacaggaaatggtgctgtccaactccctcaacagcagcaacatagccacccgaataccgcgacagtggcaccattcatttacaggtaaggtggcctctgtttatccacagttgtaaatatatttacaggcctacatactcagagtgtaatagggaaggctgataaagtggtgctttatgtcgtcattttggagtaaagtttcatgctaaagatagaggcctagaattcagtgcggaatcttagtctggaaaaagacttccagtaggatctagttttattccctctctcattccctgtcagcaattgagaccttcaaaaattgaattacttgttatcaaaagccagctagaaaccagatgccacaactttctcttgtgtttattcatattattgctactactatactgcttctattactagcggcagacttttaaaataattctcacttttacatcgtttacggttatttttgttgtcatctttgggagaaagtataccataatggttaaagaggcagcctctgaaatgataaagttgcggatttcattcctagttctgccacttttcagctataagacattgggaaagttacttaacattctttagtctcattttcttcagctgtcaaataggaaccatgcactactttgtagagttgagactattaacagaggtcatgcatataacatgtttactgtatatcctgatgtgttgcaaatgttcttcaaatgttatttataagatattactttctcagtgtaaattttatattaatttcccacagcaaggcataggtttctaggtaaaaggggttacatatataatttgtattacttatttgggttgtattactgatttgttttttttttaccttttatttatttattgtttattttactttgcattcttattttgtaggcattgaaatacacaatataaaatttttaaatgcattattatgcattttaaaatatgcatcctaccatccaaatggtaaagacaacactttgcttgttgttctgtgatttgttttaatcgattagagatatgtcagtaactgctgtgtccccagtttattcactgcttggttggtaaggagatggcctggggagcaataatgtctgctttgtccctctttcgggcaggttggcaatttaactacagaaagaaaattttatgaataggaagcaggacccactataattaagaaagggtcaaaactatatagtttaaaattttattaaattttttgaatgtaaaagtttttaaaataaagcagtttatactgatttatttttttgctcaatgaggaatgtaagtgctttttttctgaggttttttatacactcagcaaaacaaaattattataattattacatttaagctcttgggacattacaattgaatgttgctattctgacttcaatagtactaactcatttaaaatacttgtatttggatcagatgggagtctgcagctccttctgactccagggtccctgtttgacaaagcagaatttaagatgtcaaaatcatgatccacatttcaaaaacgtgagaaaaaaaatcatgaagttttaaatatgtcatactcagcacacttttggattacaaatatattctgtaaaaacatcaatcctttcaaaaaatcacaagtgaatttcataggaaagtgtaaatctagaactgctaatttagtaggcttctttctataagtagcaacaagcttttaaaaaaattgtttgcaataaaatatccagtggaaacaaatttagtggtttccatttgaaaatgtaacttttaaatatcaaaaacaggaagcagcacagcagcacagcttagaagttacagtgtggatccgctgtgtgaacctgatgagttctttgagaaactctttgagtttctgtttgacctctttaacaacaagactataaaagtgaggcagtgtagccaagtagctaagaaaagaggcattagagaggctgaagcaggaggagaatcgcttgaacccaggaggtggcagaggttgcagtgagctgagatcgtgcatttgcactgcagcctgggtaacaagagggaaactcaaaaaaaaaaaaaaaaaaaaaaaaaagagaaaaaaagggcgatagaatatgtcttactctaccattgttcagaaacagcatcttgtggtggtggttgcctaggtgggaatctcaatgccaccactgatcagttgtgttactttgggtcatatatgtaaagattctgacccacaatttcctaatctgtgaaataggtatgataattgtagaagctacctcattagcctattttgaagattgagttgatatttatctgtagaacagtatctgccacatagtaaacagccttccctaaacttcactttctaatcctataaagtatgattgataaaggatgcctacctcgattgattgtatgaaagattaaagaaaataatcccatgtaaaatttttagcacacagccagattttgagcaaattacatgaatatcagtaattatttttattattatcaacaatataagatagctaaaaataaatgaaactatggttggcatggtggctcatgcctgtaatcccagcattttgggaggccaaggtgggaggatgacttgaggccaggactttgagaccagcctgtacaccagagcaagaccctgtttctacaataaataaataaattaaaactgtctcataaaatttcacattgaagtctatatataaagtaatattcattcaaagtttttaaatcaatgcagaacaattttacaaataatatgtaaatcctcaaaaggcagagtggttaatattcattcttttcagctttcagtaaaagcttgtttatagagtcatgacatttggattatgtaaccttttatgttctttctgactttcactgttctatccccatgtaagaatccctcctataaaatccctgacaattatttttggagttgctaatcatttgatgagataagactaataatttactttttgatgttggtattatcatttgttgagtgcttacttagtgaaaatctttgtgtcacaaaatatatgtgaattttctcatttaaacttcatcatgaactcatgagaaaaaatgtcatcccccattttccagaaatgaagaagcagagatattaagtcagaatagtaataatctcttcagatcataaagctagtagaaatttgctttgcttatcagttctatctatgtgacagaaataagaggtattgttactgagaaaattctggttaggaaaatgccaatagtacacttgcaaaattctcaatcagaactcatttataattgaaaatggtaattgctgttaattagtataaattatataaatgtatacagatacatatatatatgatatgtaaatataattaaataacttttatataatgggaagattgatggctgatggtgactttttttctcaattctaggtcagtacttattccttctgagacttcaataaatgcttcatagtactctttgtcacacactgggtgttcagagttctataaatataatgtggattctggaagttaatagatttcctattagcctaacttcctatctaatataaattattctgtacatagtttcagtaattcaattatctctacagagtgataaagtagtttcaaatttgctgttattcttattcatttatcaaatagatataactaagacaaaatgtcaagaattaaagaaaatattttattttggtttaagaagttcctgataactagagctacctgaaattggaataggctgctttttatagtgttaagatggccatctgaagtatttaaaaagtggcaaagtgaccagttattacagtttaagcaaagggaaattgctgcatactttttcatttatgtactcatccctcattctacaaatactgtgtaacagaagatacaaagattttttaaaaaaatctctgccttctgggagctcagtctactaagggtagtaagaacaatatcatcaaaaatattaaaccattactgttatggaagtgtatgcaacatacacaattaatgtagaaaaaaagagggttttttacaaatctggcaaaatggagtaaactaatgcatcaccaagaagttaagataagggtaaggcataaaagatgagttacagtttgtcacaaggaggtaagaatgttgtgctatcatccgaatttgatattctacaattttataatccaggcatgatgggaaaaataataggtaaattgtgagctgctatgcaaatactagtaactggaactgctatagacactaatggttaggatttgtaattatatgaatgagagactatattagtcagttttcacactgctataaagaaattcctgagactggataatttataaagaaaagaggtttaattggctcacagttttgcatggctggggaggcctcaggaaactaacaattaaggtggaagacgaagaggaagcaaggcacgtcttacatggcagcaggtgagaaagagaggacatgggaaactgccatacacttttaaagcatcagatctcatgagaactcactcactatcaggagaacagcatgggggaaactgctcccttggtcccatcacttcccaccaggtccctccctctacacatggggattacaattcagatcacaatttgagatgagatttgtgtagggacacagagccaaaccatataagatactaaagaagaaaagaaatggaaataatttagattttgtttttctctttcaatgaccccttctccatacatcaaattttcagctagtcttcctaacccttcttctgaaacataccctcaatcagactttctttccatttccagcccttgtctcctagtccaagccacaacaccaccaattctcatctagtttccaatgagtctcccagcttccactctgggctctttgcagtaacatccttcacacagatggcattttgaccttctaaaagcgtaaatcatatatcttattctaattaatgaagccatctattaggtttccattacattaaaaaaataaaactcaaacattgcaccatgaccctccaggttctaagtaatctaataccctgttcacaattgatccccacagccacatgcagtcccaccttcccccagcacgttgtatctcagccttcatcctccttctcaacaaaccaacctatattgctttagaacatatctttggcatatatgttcatttatgactgtaacaactgtcttctagatcactgcaggcctgtcttgttattagagctctgctaatctccagccatctccaaccacctactccaggggaatatatattatgcgccttctcagaattctatttaatcatcctcttgtattttctttacacagtttattactatctgttcttttcttgtttacttattaactagtgtgatttcagccacctcctaatgtaatgtaagttcattgaaattaagagtcttgtctttctcatttagtagcataattgcccagtacagaggccacctacagtagataccaaataaaaattgttgaatgaaacactatcatcctgtgttagaatcacttgctatagaagaattttcaaacctgccaaaaatgtacactggaacaaaaaaaaattctgaagtctctcacttcctataaatgggagggtttaactgaaatacaaagagctttaaaatatttaaagaattaaaccataccttctcttcagcacattcattcacttattttttatcttctttcaacaactacctactaaatatctcttatgcatgagacatcaagaattgagtgaaaaaatcatacgtcctatgtcgttttcttttcatcatccacaatgtggtagacaaggggcaagctcaaagagaacaacaaaatgcagctggaagtgtaaagctccccaggagtgaaatagatttgttatactgaggcttcaaaaaagtgaaaagttacttttagctattggaatcagggaaagtggcacttgaactgagtccagaaagataagtaggatttggtaatgcagagatgagggggacagggagggaaacataaggctgaaggaaccacataaacaaagtcaataaaagatacgtaggctggtcggcaagtaggtcagtttctcttgaacattgaagattgattggagcctggttgtagtagaaattcttgaatgtcagaaacttggactttatgtatgtatatgtgtgtgtgcatacatgtgttcatgcatgcacatgagcatgtgtgtggaaagcatgatcagaaaagttattctttcttcagtatgtaaaatggattgtttgtgggagaggtcagagtaggatgaaccaggttaaatgtatagatgaaggagcaatttactgaatttcttaggtttgttaaatctcgaaggaggttccagttattggaagaaaagagaaaggagaaccacatagttttttcattctgtttttttaaaactcctttttttattgttcctcttctttcttggtgtccatcctgagctatataatttgaacctgtttttcctgcctggagttcaaatattgttaccttacatccttcagactttcaaaaaatacctccctttttcccatatgtcatttttcttccattgcttttgtgttaattacatcacaactatattctacatgctttcaaggacatgtgaaataaaataatataataattggttaattacagagaaaagggagacctgtgtgttttccctaaacctgtctctttagaagcctccaacaaagttttgaaataatgcttacccagagttatgctgttttgaagtctacattctttcttttctgaccatttgtagtaaataccaaggaaacaatgcattggacataaagcaaacatgaagaggcaaagagagcagaatcagggttttgagcagttctcaaaaaagaaaaatacctaacccttagataaggcaaggcactattcataaggagaaaagtatcatgcttcttaagcccattaattaaatataagcagagaccctctattaacacttgacttgtaaaattaggtcaagaaaatctgaatttagagtttttccttcttttgatataatatgctgtactttatacaaccacaccatggattctcagaagagatttttattataaaatatttctgtgggactatagatttgcctaggatgtgacagggaaattgacattttaatatgctattttccaaaaggtggagaatgcaaaacattagttttgaaaatgcttactcacaaggttttaagtttggcttatttgtcgagctagtataatgaagaggaggaggaactgtgagtttacaaagattgaaatgtgaagcctttaaccatcattcaggtaatgcttttgtaagccctgaagctacttctacataatataccacagtaatggttttatgtgaactgggcataattgactatcagtaaaaactaaagcttattgaatgcttggcttgcaagctcgtcttttgctaggtttgatatgtatctgcacatcaggtagtgatttgcatttcctcgcacagcggtatttttaggatggaatatgaacacactgctagaagaggcacttttgtgtagaatactaccacgagtcggcattttcccagcagagccagcagagaggttcacaaactaccttttctgtgcttgattacgaggttcatggcaagattgcctaaccaaaccattgttatttcttctcttcatattttatgttatgtttttggaaaccattttaatcttacagaaaatttgcaagaattgtgcaaatgactctcatgtacacttctcccagagcactcagagaacttattcatatttcaccaagtttcaccaaagatggtcacttttagtaattcaggataaatattgcacctagtagctgtcacatcttctgaatatccctcaatctggaacaactgtttagcctttccctgactttcatgatattgatatattgatggctaggcattttacataatgtttctaatttgggtttgtcatatagttcctcattattagatacatattaaatgtattttttttgtcaggaatgtcatcgaaatgatactgtgtttttcctgttgcatttcattgggtgtttcatgatatgaatatcaatatcttccattttggttgtgttgaatttgattgcctgattaagataatatctgccacaattttatattctaagtgaatttgtctccagttgtatgtaataggtatttttgtgggaagatattttgagactgtgtgtaaaaacgcaattttgtatctactttgacccacaagttttagcatccgttgagctttgttgcctgaattaataatgtgcaaaaaatgtcaataattaatgacaactggttttctaattccatcctgtcttctgcattttctctctggcattctactttaagaaagagatgtattttctccccatgatctttctatctatttaaattgtatggacaaatagatttctactgtatttgttataattcattactatcacaacttactttgatgcttaattttccaagatttggccactgggagccccttcaaactggctgtgtctcctttccaactgccctatcactctttgagaattttctttctttatggctcaaggtgttctaggctcatcttgcacattccctaacttggctttagatcctattcttttctttaaggaacttgtatgtctttttgtatagggtgattttagaaaccaagatctcattgctcctaggttttcttggtggacaaaaccaagaaatttatgtatgcatacacacacatacatacatacacatacattgaagcattatttattttgatattatatatatgccttattataattcaatgtgattattcacatatacatacattcataatacctccaattccaactcaacaccacagtttatttttctttccatacttgtgcctctttttgtcaaccatgagaaacttggctctcattattctcaatatgttttcttatttactcaactcccctgaatcgagtaaatcttccatccacactagacttctgttcaacccaacagtttcctggccttggccctgtctgtcacctgtctgcctttccagaatgaagaaaataggaaagcaagcacattagtggtttttgaaagatatgtgcttttctttcctttttgttggggttataaacaggaattacaataccattagttaatgtttctgactcaaatcagttctacttgtgtctacatttgtgaccatatctatatcaagatggatccacagggggaaatatttcttgaatacaaatcagtatgcaaacattcatgtttatgacattaaagattagaggtttgatagtgtctaggatttattactgagttccttttaatgatcagtacataaagaataacatttaggttagaccagtggaagtgtcacatttaacgaccgagtgactgagctgtctgttagctaagggaacctcaaatgcagtaaaatacttagttcagaggcattttcatggagttaaactgcagggtagtagttaatagagcaacatttacaggtagccagattcaagtactggttaagcatctactagattgttacctagggcaacttatttgacctctagatgtcttaatttctttatctgcagcacctacattgcaagattattgtgaattttgagtgataggctctaggaaaatactaagcaccacacttggcacatattaagtgcacaaaaacaggtaatagctctcatggtaatcactggtatcatgacttttaattactacaactctcagtaacagatgaaggacctggcttattagaattctaaataaattatactctggaggctgaggtgagagcatctcttgaaccaggaaggtcaaagcggaagtgagctatggttgctttagtgcgctccagccggggtgacagagtgagaccctatctcagaaagtaaataaataaaagaaatccagataaactgtttttgcaatgctgtatcttatagtttcaatagttactcataacatgatgaccatgttgtaaatgcacagtaagattgtctacataggaccatgttgctgaatattttgaaggaatattatgatacatattttttctttttccagttaataggaagagaatgcattatcagtttatggggaaacagtgaatgtgccactgcattattcactatatctgtcaaaatgtactttctgattagaaaacactcttgattctaaagtctttataaattatttcatgaatcaacccaaatatttttatttaactggtacaaatcatgcataaaaatagagggtatgttgtgcgtcttcagagatttaactcaacttctttgatcatttgcataaaaggtacatctttaccagttggcattgattgatcctctatagactggagttaaaatctaattttgccataacaaattatgaggtggaaatactagagaaacggatggcttgtaacatcagtagacatttctggtcccatttccatgtgaatataaagcaaggatgacttctaagtcctttttacagtgatttgaagtttaccttcaccatgttcctttctttcatcgatcaatctatttccttattaatgctaagttagatcactcatgtagggaatttgatgagaaatacaccagagaacttaaggtaaataagagtctcttgtgacttaaactaaaagacataaaagagtgagtctgccaaaaatatgcactgctacattaacaaaaattttaaaaaggcttccaagacaagactgagctgtcacaagtaggaatacatttttttaaaaagcatgtctcagacagggggaatgggaacttaaccaatggaattaagtcttacatattgaggaagatagctgtaagtcagcttctgaagaattctttttaagagctgtttgcttttagtagagcaaaaactatacggctaaaatacattccaagttttcttttactccagactttcttagatggagatagaatcttttttaactaacatggccagaaacattcttgctcctgtgacagctgttggtcttgttctcataggaaccaattagcggtgggctttagacaaatatttcagtgaaatgcttaatgtgactcagcttctaaaagataaatctgtgaatacaaagtctgcaggactagaggtcaaccctggctcccagccagttcaacaaggtgctgtgtctctgtgacacttctttgcaggcagccagtcagctttccctggggtccacagtttcactacatactctccatttaaacttcttcagcaagtaataaaaatccttagaacacttcagaggattgtttttcccttcgttcagagacaataggttaggcaagaggtcagcgaggggtagagtggcccacaatagatgaagccaggtggaagaacagactttagtagactttagaaacgaatggggagggactgtcagtagatgggggatatgtgagaaattggggtccagaagagaaagaaacagcctacacaaagagcagatatatttgctcttttaatattgaccagaatttcacaagagagaatgtatttccggtccttttgtaataacagttgatttcacaattattttgcaaggcaggcattttttcttatttttacagatgaacaaacaagttcagagaggtgaagtaactagccaacatcacatgagttagtaactgattagtgatggggtcaagttttacacccaaacccagtatatttacacatatgctactctttcttgcatatgttttacccaccaataattttgttttaccgttgtggctaatattatttattcatatatttataaaagatttgttgactgaaacttatattctgatacaagactggacactggggatacaatggtgagttcaaacatggagaatagcgtctagtctgggagttaaacattaatcaattaattacattaatctcatatcacaagagtatgaagttctgaaaacataggtccagggaatactaagtatgaagtgcttataattggagactttgcctgatgagcgaaattagggaggaattttttaaaaatagtcacttgagctaagacttggagggaaggaatcaactggatgaagttgggaggaaaataatcaagtgtaaagaccctgttttggcaggaagctgtggaaagtgggtagaagactctggtggccacagtagagagaggagagaggagtcttgtgtgagatgatgctggagaccatcatcccataggttgcgtgggacccaaccatgcaagaccttgtaagttccgtaaagttttcaccagagggctccatgaatcaggaccaggtttgttaataaaatattatgactttagttctataaatgatgggtttgaagtatttttgtgacagccaagaagaaatgtcaattagacagtctttatatacattgggaattcagagtaaagtgctgggttagagttagaattttagaattcaggcataaataaataataaccaatacaatgaatatgattgagatcatttagagagactatagacaaaaactggaagaagaatagaatattcctttgctgaactcccgcttctgctctctgtatccccacttctttttctactacccagaaccacaacatttaatgattatgtagaggaaaacaatagaataaagtagaatccagagaaaatgggaaacacactggagaatttttgccataaaagccaaggtagtacagtttgataaaggaaggaatgggctgctgttctaaatgctgccgagataccaaatgattggaagactaaaatatcttttaaatttagctactttgaggtctttttttctggccttaatggtatatatcctatcatttaaatagtacattttctttctaaatttgtttatgctctttatattcagttttaagctagaataaaataggaacagtctgtcagaaattattggagtccaaggcacaactttgtataggaaagtttctttcttgtatagttctttctttcatatattaattcacatatataacacatatatcaatacagacaacatgtagttttccatactttattaaaacctaagtgaacttttaagtttctaggactgtcagttaaatattgactatttctaatatcaatgattactttttttctcttgaaactcaaatttagattaaaagcaaaatgttaattaagcattgattcaaaaatataatacatttttattcatatatgaacattatttgtaaatattcttaaagtagtaaatattgaaagatcacttgtcatggcccagacctactaccagaaaaaaaaagggtagaagtaaggcaaatgagatgtctctaaagaacacagtccagtgtgcaatcctatattacctcgcctccttctgtgtcttagtagttcatgccgtgaacatttaaaatgtgtgttagtttgtgtcaaatatacgtcgattttgaagctgcatcaaatagaaagcatatcttaaaatatttacccatgcataaagggaagaaacatgcatgaagtatgattagaatatcaaaagtattcaggacctttgttgagtgcttttcttttaattagacacactctttacaagttaaccacacacacaaatacatacccatgtacatacatagacaaatgtgaaacagatgatatgaaaggtaattgtaagaatgagaatttgtttctggttgactttaattgctctgaaatctttggtaattaagtcatcataatgatgtataaagtctagaacaaaattattttttatttttacacatattttaaaatatattttatagaatttttgttttaaaaaagaattttaggtgtgattttaatactttcactattctcacaaaaaatgtaatttggccatatttcctctaaaatagcaaaagaagttggatcttttaaaatattttgctcccaaattataatcaactattggtagttataagcttccaaatttagacaagcctaagaaatctaattccacatctcactcccacttaggttgtgtatgaaaaataacacagttctcctatacatagacagctctggaacattccagtcataaagaaatacttaccttgatggaaaatttgtaattaatatttcttgtagaacttccactttgatgagtgactagtgactataactgctatttctttctattttcatggttaatttcagggcacattcagaaaatgaaggtaccgctttaccatcggctgactcctgtaccagtcctacaaagatggacttatcatatagtaagactgctaagcagtgcctggaggagatatctggtaagtgacctcatcgatgcataggtcaaacctaggaatttccgtattctctccataagactttttattaaatcatatatgtggtatactgtttttagtgcaaaaatggactatatacatctcatgcttcaaagatcattaactatttggctattctgcttaggatgatctctttgttactataaaaggaatggtagtcctttcagaagtgaagactttaagtcattttgccctcagtcaagtagttgaataaaatcagagaaaacctggataatacatttggagattgaaaataaactaatgattggccatgtatattctccatggctaatgcagcctgctctgtcatcaattctgtatgatttaaaacatctctacagggtggcttcaaatgaccattctaaaaaactctgaaaaggaaaatattttattatatatagatgatgtaagaaaaaaaatacatatcccagacacagttatcatgtttttggtgtgtatcaaatgggatgctcagcttgagcacaatgttttctctagggtccaggtaagcctaagcatatatggaaggcatttagtttaatttcattacatatagatctatattcgtgaggaatcaagtaacctcctagcaaaatatattgcccctaaagggtgagagagtacagagtactttatctgctcctaagtataataatgcatgaaagtaggggtgtgtctgttgttccaggaaatctctggtccaagcctgtgtattcacagctaagttcaaatgaagaaaactaaataaattatttaattttaaaaaattactgtgtactccaaagactcaaagtataagtattgctatgaagctcaagcgactctatcacaaatttgggggttaagaaacttccccacttcggcagacctgaaaaatatttggcaagcattagacatgactacagcatcctgcagtggatactgacaacaattacagaacaacatcccaagggtacattttggaatcagcattagttgataacattaggcgtcagaggtttcatatggagattacaacaaaggccagttctaggtaggggtagaaatggtaatgccaagacacagatatagggctaataattgtagatttttcaaatacatgggggatgtgttgactttccattaactctgggtagtaccacggtcaaaataatgctatgtgtctattatgaccagatgttttataaaattagcatggcatgaagatgtgtatgcctcatatatttatacataaatgtcctcaaattgcatgttttagcactagagctcaaatctttaggataaatgaatttagtagagtttgaattgcaatttttttgtgaatttcacaaaggaacactgttttcagaaactaatatatcacggtatatctgattgaatagtctgtatttgatgtttttctccacttccttattgtctaccctttgatcactttttcatttttccagttgatatttccttttaacattctgatttttaatagaatacctgaaagtgaatataaactggcaattaatgtaataatttaatgggtttatcagagagcataatatcattttgcagcaataatcaattatttacataaaatcatagttttcagtctaggattttgataagaattcagtaaaagaaagaaaacagaaaataaatggtacagtgagacttgtctaattatgtcaatctcactatcatctgtttaaatgcagcctatagtgggatagtgaaaatgtctctcgttgcttgagatttcctggaagaattgtgatattatttgcagttagtaagttataaattgagtactataattgaagaaatttagatgaggaaatatgagcaggccagtgataagatgactatcacagagaaattagattacatatcttcatcattttaagattttggtttatgggtcactattactctcttaccatttctgccttaatttttagtgattttagtatctacacgggtgttctttctaacaccttggcctctcctcccataattttgtgttgcagtccctcctgagcttcttattctcatcatcataccctagatctaggcaccatcagaaactactacttctctatgacctcactttcatgcactgcactctcactgattatatactcctatcatttcagtattcttccttttgttccctaactccagcaatgattccactaggatttccaattcattgatcctaccactttttaccgttcttcaccaacctccgcatatttttcttctctccttagctgaattcctgtaatgagtgaatgtatttttatttttatatatcctaactccattgcctctctctcacttaattgtactcatttgatgaaatcatgacctggttacatttaaatctccacctattctataccaacaatgaatgaaccaggagaaaacacaccgcatgtcaatgcaactcactttacatatatgacctccaacctcaagtgactatgtaatgctcctggcagtcagtctattttttatacctttttttctcaaatgtccgacatcaccagtcccatcctttctcttaactgacaacctggatatgtacttcacttaaaaaagtgaagcacaaagaaaagttcatgaaccactgtcatcacatctacccaagtaaaacatatatacccacttaatacctatttactctgcttttacttagattactctctcttctctttaatagctccctcccaaccaaatcacttattttaggccatagcatactatcatttctccaaccttaatttaaaaaacacaacttcctggccgggtgcggtgtctcacacctgtaatcccagcactttgggaggccaaggtgggcagatcacgaggtcaggagatcgagaccatcctggctaacggtgagatgccgtctctactaaaaatacaaaaaaatagccaggcatggtggcgggcgcctgtagtcccagctactcgggaggctgagacaggagaatggcatgaacctgggaggcagagcttgcagtgagccgagatagcgccactgcactccagactgggagacagagcaagactctgtctcaagaaaaagggggaaaaaaaaagccacaacttcccttgaccccaaatttgtcctcaagtactgttgtgatttatctccttctcttatggcatgctgtaaaaagagtacggttcaatcacagtctcttaggcttttagccccacttctccactggaactgctcttattgaagtcaccactaatgtcaacatggccaaatccaaggatcaagtctcagggcttatcttatttcacctcacagcagctatttgtcctcttctaagaaggtttcttccttggtgctatagtttggatacagtttatttggtctcaccaattctcatgttgaaatttgatttccttggccaggcatggtggctcacgcttgtaattctagcactttgggaggccgagggggtcaggtaatgagatcaggagttcgaaaccagcctggccaacacagtgaaacctcatctttactaaaagtacaaacattagccggctgcggtggcagacacctgtagtcccagatacttgggaggctgaggcaggagaatcacttgaacctgggaggcagagattgcagtgagtcaagatcgcaccactgcactccagcctgggtgacagagctagactccatctcaaaaaaaaaaaaaaaaaaaaaaaaaaaagaaatttgatccccaatgttgtaggtggggcctcatgggaggtgtttggatcccaggggcagattcctcatgaatggcttggtgccattctcctgggagtgagtgaattttcactgttaggtcccacacaaactggttgttaaaagtaacctggcaccttcactttttcttgtttatgctctcaccatatgatctctgcacaacagctcccctttgcctttcactgtgagtggaagcagtctgaagccctcaccagaagcagatgctggaagcagcttcttgtacagcctaaagaacagtgagccaaataaacctcttttcttcataaatcacccagataatcctttatagcgtcacaaatggactaagatacttgattttcagagtcatgtatcccctctgttttcctcaaaccttactgttcctttttggtttccttttctagttatactttttttcttgatgatttcttatgatttaaatgatccaggtctctgcttctaggtttctctacctataaatgtgatttaatatcgatattatctcatggctttaaatttcatctatattctgatggcttacaaatgtctctctctgcactagttctctccccggaactctggactcaaatatccaactgccaacacaatctttccgcttgaatatctcacagacacttcaaacataatatatcccaaactgaacctctgatattaacctagcaaattgtacccctcgaaaactctttacccaagtcttctccattttgattaataagaatttcatccttccagttgcccaagcctgaaaccttagagttattcatggctcctttttaatgcctcacacctgatgtcctgatattctattcattatagtatatttttggctccagaagtattgttttctatttgtactcagaaacaaatggtgtatatgaatcaactttttaggatatttctcagtacttgaactcttgttattttctcagaaattcagaaactgaaaaaatttagatgacacaatattgaactaactataagaaataaggtactaagataccctagaataattgcattttaaaatatatccagaatttgccagttcttcttttttctacttttatctattaagtggcatcaccaatggatggttagtatatagatagcattcaataaacgcatgtaaaatgaaattaatataatggatgtagcattaaaatgagaactacgctaaaaaaggaacctaataattttcagaggaaaacagtaaacagaaaagataggacttatatctttggctttggaaggcactcaggaaataatcacagtgaacttatgaccaattatactcaactgaaggggttgatataaatggaaaataaaaatttacttttgattatgccatcactgaataatcaaagaatatgaggaagaaaatgtttagttattctacagaagtaatgttagagttcagaagctctccccgttgagctgggattttaagacagcacattagaaaatggaagaaagccaagaatggtggctcatacctggaatagcagcactttaggagaccaaggcaggacgactgcctgaagccaggagttcaagaccagcctggacaacatagtgagaccctgtctctaaaaaaaaaaaaaattcaaattgttcaggcatggtgctgtgtagcacatgtgtagtccaatctactcaggaggctgaagagagaagactgcttaagctcagaagttcaaagctgcaggagtcatgatcatgccactgcactcaagcctgggtgacagagcaagaccttgtctccaaaaaaaaagggtggggggccgggggagaagaataaatttgtaacacaggttgaacatccataatttaaaaatccaaaattcagaaggtcccaaagtcataagtttttgtgtggtgacataatgccactagtggaaaattccaaacctgacctcctgtgacaaattgcagtcaaaatgcaggtgcacaacacagtttattcagcattctcaggggaaaaaatagtctgtcagcccctttagctgctatgtatcttttccatgcacacccacaaagggtaatacaatggcatgtgtgcagaatggacatgccaatggcaggttccccacagtgccccacattgggtcaagacctatacgcattactctgtggtttttgttttgtttttgtttttgtttgtttgcttatttttcattgtgtggcataaagatattgttgaaaatgtcaaaaaggcctgaagatacccctatgggtaacagtgataagaaaaaaaggaagcgtttttttttgttttgttttgttttgttttgttttttttatagcacagaaagtcaagctgttggagagactagactgtggtgtaagtgggaaacatcttccagaagagaatggtgttggaatgaccaccatatatgacctgaagcaaccaaaggataaattgttgaaggtctccattgaaagtgatgaacagaattaatgaaaaacagaaaaacactgcataaagctgaaaatgaagatctcaattgtgtattgaaagagtggatccatcagtgtcacggtgtacacatgccacttaatggtatgctgatggttaaataagcaaagatctttcacaatgaactggcaattgaaggaaactaaatattcaataggctggttgtggaaatttaagaaaatatatgacattaaatttttaaagatttgtggtgataaatagtgaaaacatacattgactagttttccaagatcattgccgatgaaaaactgactctggaaaaaatctttgatgctgaaacaacacaagttttgatgcctcagaaagatactgacacagaagataagacagcccctacaggaagtaaggatgccaaggacggagtaactgagattggatgtacttatacagcaggaacccataaatgaaaacttgctgtgataaccaaaagcttgcatccctgctgttttcagggagtgaatttcttaccagtttattattatgctaacaaaaaggcttggatcaccagggacatattttctgttggttttgcaaacattttgcatcagcaattcttgctcactgccaggaagctggactgaatgactgcaagaatttatttgattatatttattctactcattgtctagctgaaattattatcaaaaacaatgtttatgccatgtactttccccgaaatgtgacttgttaatttagcccagtgacgaggtgatccttcaatcgaaaaagaataaatataaaaacacttccttaaatagcatgccagcagcagtgaacagaggtatatgtgtggaaaattttcaaaaggagtttagcatgaaggatgtcatatatgctgttgtcaagccttggaatgcagtgactaaagacatggttgtacctgcctggcacagcctctggtctgcatctatgttcaatgatgatgatgaaccaggtggtgactttgaaggattccatatgtcaaatgagaaaaacaatggtgtctgaccctacctattccaaaaaaaaaaaaaaaaatactttcagagtccataagtaggctagaaaaagtggatatcaaagaaatttttaacattgataatgaggctccagttgttcattcattgaacattgataacatagccaaaatggtgctgaattcaggtgactgtgataatagcaatgatgaagataacaatgttaacactgcagaaaaagtgcctagagacaacatgatagaaatgcatgatgatcttagtgaagaactagagcagtgtacattcattacagaacaataaattatgccagttgataaaaatcagagagatttctaagacaaaaactgttgttaatgaagcagatgactctggggtaaacattttaaaaagctacacagcagaatgccacctcatccctaaggggcccacttcccagtccctcaactgcttctgatgtttcttctcacctaaaaaaaaaatacagtgtacagtaaccttttaatccaaatacagcattgaatgtagagatggaaagcttgtggttgtttgtggttgctgttgtttcatagctgatacaggtattctggcaatgctactgtgctgcttagtgaccttgaacacattattttttcactgcattaatgctatgtcatattttttattggtaagtacttatgtataaataattgcaataaaataattgcctattagtagcatataaattcagtcaggaatgatggtgatgccacaaaaccacagattgtacaatcctgttaggtgactgagatagagacacctttgatttctgatggttcaatgcacataaactttgtttcatgcaaaaaatttttaaaaatgtatagaattaccttcaggctatgtgtataagatgcatatgaaacataggtgaattttgacttgggtcccatccccaagatatctcattatgtataggcaaatattccaaaatctgaaaaaattcaacatgcaaaacacttctggtcccaagcatttctgataagggatattaagcctgtaatagaataaccctataaaagaatgaacctctcagaattctaaagctcatgagatgttttctatattaatgatgcctctctttctcagaatctccatcctttattggctttcatctttctgagttctggatgctagtgaaaccacaaagcactaagcacctgaatttattgccaggtcctagctcagactggcccacagaataccccttccaagactgtttgaaatgtggaaagagaaatgttctaggaattggaaaaaataaattttggcttcagcactgcaattatttagcgattatttggcctctgcactgtgaattgctccctggttcccttttctgtgtggtgaatatgatgatacttaataaactcagaagattgttgtgaggtatggtattattcctccatcagtcttttcagtaattatcacctggcatcttacacatgccagacatctcaaaatttgggaaaacaaatgtgactaagaagtgagctctcctttgaaaaagtaagaaacaaatagataaaatttaacaccacaaataaatgaataaataggcacatggaaacaactaacttagctgtaaagagtcatgcagaacttaaaagaagatcagacatgcatattgtagaattctaatgaacaatgaaattgtggaataacatgaaaataatgggaaacaaattcttcttaacttactcttttcattagtttctttttgtaaaattgggcatttctcctaaacttactgaggtttcgatagttctctgattttctgcaaccccaagcttcaacactattgttattgttgaacttttattgctcatggttgctgtaggggcctcagtgaggaataattctgcttcccaagtgaagtggccttcatgatacagaattctgaggaagttagtcttgccagggtaagatgcaggctttataaatttgtgaagtctatataacattcagagtcctgaaaatagtacagaaaataaaatgtatagtgtctagaaaggggtttaggtgagttaggagttctatagcttaagctctattgctgtgtattaagcctacctggaagtactggtgtcgttttgtgtgtctggtatccattgccccatcttctgataacagcaccttgattttctttggggagaattctctgctcatgtgatctaactgaaattgatataagtggagccaatgagaacaatctattcattgactgcagtgactgtttgaggactggatgtgtgacccaatcaagtttgatcagaacaaataagactcaatctcaggacttttcctgaggttgttataagagaaaatgtggcacatatacaccatggaatactatgcagccataaaaaatgatgagttcatgtcctttgtagggacatggatgaaattggaaatcatcattctcagtaaactattgcaagaacaaaaaaccaagcaccgcatattctcactcataggtgggaattgaacaatgagatcacatggacacaggaaggggaatatcacactctggcgactgtggtggggtggggggaggggggagggatagcaatgggagatatacctaatgctagatgacgagttagtgggtgcagcgcaccagcatggcacatgtatacatatgtaactaacctgcacaatgtgcacatgtaccctaaaacttaaagtataataaaaaaataataataataaaaaaaaagagaagtggtctctttttccactacacctaaaactaacaaaagagaagcttagacctgctaacagtgacctccaccctcaaatgaaacaaacatagaggaaacagaacctaaatcaggagagaccaaattcaaggccattgtcggaaataactgagcccctgaaaaatccatgtctgaaactatttctcctctacttttgagttatgtaacccagaaaaaagtctttttgtgcttacacaaatgtgaaaatcatccctattgcatgacccacaggatgtatgacatgtaaagatttgccatactattaaagagcaaacttgagtggttcacattgcaatgcagatgtgttagagggatttgctaagttagttggagagcttagctgtttaaattttcaccaatgcagtaactcacttgacattataaaaacattgtctttgccattaaatggtaatgaaagtttaaaaaggtaataaattatggtttgaagataaatatcagaaatgcatgacactcaataaagtagaatactggataaatgactttttcaatttgaatattcttcataagtcttcagtgcacctctccaaaatttttaagtacgtcacttaaatttgcttttgcttattatgttctttgtgaagaaacctagttgtatttacccaatctgatgatggtagctccaataattattatagtcaggtgaaatgtattatataatttctgccattgaagaagtagcttattgcttcctgcctttcctctaagattcatatcatgacctcaatattacagtgctggctgaattaatggtacagattttactgctttggcttgagttttattctcacattcattgacagaaagaatttgtcctcagaggccatccctttcatcatcttccaagtgattctgccaaatgtaaagcgagcccaaattttcatcccactggtactcaaggaagtttttcaatttttcttctataggttcacacttgccctttttttttgcataagactatccaccaacatgtaacacatttgtttaattcacttcttaacctttatctggaatttatattcaactgaaaaatgttcataggtgctggactggctcaatatcaataaagctggcatgtcatttgtaaaaaagtaatattaaaattattggttgaattcaggaaaccattttagaaatagaagaatttaggttaaccagaaggataagcgaatggttacatgtgcttttactgactaccagactttgtattaaaagtgggaaatatctgacatttacaatctctgtaaatgatcactgaaattgcccttttttttttgaatgtttataaagatcaagaagatcaagctcagataattcaaatcagtttaggtcttttacttaaatagccacattataattatgtttactaaagagctgaaaagcattcctttccagcacattataatagctataacttattttaggtcttggcgtaattagaatgattcacatttttcctactgactgggtgtatttgtctcctttgcactgcaccttcctcctcttccttgtataacatacatctatatgtgtgaatacaaacaaatataaaaacattcatatatgaatgtacccccaaagcaagcaggatggcgctctccagagaaggaataagtgggttccccactgtcgctcagagtaaatgtggactgatgtagttctgggacaaacctactgtaaccacaagttaataacaatatctttgaacaaagagacagaaacccccttttgataagccttctctacaatcccctccttgctggctccattggactgagcccatcctttccagggttcacccctccagaaggattaaatttcctgtctcattgaatcaggaagaaccatgtgatttaatctgacaaatgaaatacaagtggaaaaatgacatgggatgttcctgagcagaaacttaagagccattgcttggatctctcacctctcttttcctttggtcataaaatcaacatgtcccagactaggattgctcttgtagcatggttgttagaataaagaatacctgagagagagctgtaacaaacagagtggacattaatgtcagcaaaatacatctttgtattgaatgccactgaagtttctaaaccatttgtaaatgcaatataacaatctaattcaggatttcccaacttcggcactgtggacgttgtgaaatgcagaattcttttttgcatgggggtggtttatcattgtaggatgtttagcaacatcactggccacttccccttagatgtcaccaccacacccacagttgtgataacgaaaaatgtttccagatattgccaaatgtcccttgggggaaaaaccatccccagttgaaaaccactaatctcagcatagtagttctcaaagggggttttcagagccagcagtatctggaaatatgttagaaatacaaagtcccaggaccctccgagtccaactgaatgagcagttatgtggctggggcacagcgaactgtgttttgataagccctccgagtggttctgaacatatgaagcttgagaaccacaggtttaaactgattggtatatgtataagcagtcttgaataaggaaagggcataaatattgcttttatttacagatgaataaggtcaactcatttgatatataaagcattagaattgcattttttgtgaatctgtaaggctttagggtatattagcatatatactagtgtaacaaatgttaaatacattgaaatttcataatttgaacaaatttcactatggtctcaggacttggaaattcactgtgtcacaataactcaaaatgaaagaaaaaagattttctacttaggaattctaaggggagtgtcattttggtcttccaaaaaatactttacaaaattgtgtttttaggagcataactgtcagtttcaattatctgatatttgtactgtaattttatttagcacattttatataaacgagtagtatttaaaaagtatagaattgagaatgagtatcaataattcacagatttctttattgcagaattttgtcacaaataattgctgttctttccagctaatttccttttcatatctataaaatgggtctaagtctgatctaccttgaaaggtggggcataaggaataattaactttacaaagtaagtggttattatgtgtaaagttataggcaatgcatattataatgctaatatatatagttatgagattgggtatttcctctattgagattggcaataggaggtagaaaatcacaattaattttgccacattagctctgaaaatgatgaagataatatctctgcatatttctccattttccctcatttgataaaggagaaatccctatttttctgtttgtgagcagaaaatcttcagaagttaaatactgaaaggtcgatagtcttcttaactgtcaatggtacccatgatttctgctatactatatatttgttttttaaagttgtcctaaaatcagaattttgtggtggtatagtgtacgtaccagtacaaggtaaatacaagaaaattatctttaggttttctgtttttatgaaaacattaagaaataagagctgattatgctgtgataggcttatgaaatagacctggaaaaatgcaatatcaaaagacacaatgtgcattttgtgttatctgtaacattattatgttccacacacttgaccataaactttcaattttaagctttgagtcaaaatatcaagggaaaacccttttgagttatttttttctttctatttcctttttgtttttacaaaaaggctgtaagaaatctttatcatcacattaggattttaggattcaaaataagaaggctttgactttgttctttaaaagattagggaagtctttccctttaaagcattatctcctagcgggtggagagtgtcatgcttcattttttaggtcctttacactcttgaatttgatttgtgcttttacagcacaaatcccaacattcagaagggagatctgcctgcttcagctgcctgcagctacagagaattagtctgtcattctcggcatcggggagtgtgtgttgtgtatgtgagggtgtgagtgtgtgtccgtgtttgagattgggtggctgagagtcatttaaatgtgcataaggttaatagtggaagatctcgtacaggcttggctcagaaacctgtggcattctacgctggacagccgttcccgtgcctctgttttaatttggcaggatgtttgctgccatggcagccagcagcatccactgcagcagcaaggaagagccatagatctgagaatgcaggtggaatactaaaatgtaagaggcttgtgcagggctgggcgtcagtgcttaattcctgctcttcctgggctcctatgagcaggctgtacttgctgcactgtgtcagctcgttagagtaaagggttacagacctaggtcagttaagggctggtgaaaggcaggggaaagaaaaaaaaaagcaaaaagcaagagacctcagctcgtgcttcacctcctggcgtttcgggacacagaagcaacagagggaaatgtggacccatcctcctgctgagacatgtgattggatgaagacgggcaaacgtagttggcttcctggactacttttcagctggaggagagtctttggtgaactcttttctgcttcagatatattcgagcaaaatatttgtaagtactgctgattagtaaagtgatgtgtcaagctaaattgggggcaaataattatatatactatatctctagaatcttctgtgaatgtgtgagcttgagcttttattgaagtgcatgtgataatcaaaatcaaatggatcagttacaatcacagtgtaacaagacaatatgaagtccaattgaaaggaaggagccactggaagaatcatgcagcggcctgctgaactctctgtgttccggagcaaagaagtaaggagaaagggagcttgccttcagaaacaaaagtctctgaccaatctttccctcaccagtgatggggagaggagacccacggtgcgcatttccaactggtttggaaatgctgccaaggccagccagagagaagccaactatgcagagcggcgctcactgtccaagtttctctcgcggtctgtgcagtccctgtatcacaccagcagctcagcctggaacctcctgcctgctgggggcagccagtcagacagtgaagacttagaggaattgtctgcaagaagaggcttggaaggtgagagtgatgaagatagtaggtctgaagatgaaaacgtgtcctccaagccaagcagcatcagcagaagctgggctgaagaggagggagaaagctgtttgcgggaagggacagctcatctggatgaggaggtgatccttaccatgctgggtgatctagaacaggcactttacactgacttattaggtaagtccaatttgctcctaaaaacgtgtatgggatcttaagaaatttcatagtctcttatgaaattatttgcatttgccaaatagctttcatgtttttagactgatttttaaaaatacatagttacattttaaattcctgtttcttgaagtgatttttttttttaattttttggtaaaactgagctatgagcaccactggtaaggttcatttggagaaaataaattccggaaatctgccatgggcattattagcctcacctagtgtccagtaccttctagacatccataaataagttaacattttaaaactccaaacatgtttttcacctactcattaaaggggcctatttgttcaacttccctcaaggtgacctcatcacagataagggatgaataatgaagggcctcctgggtaaattttctgtagagttaagtttcttctgctgcctccgtgctacctgaatagaaggcttcttctatacctcagtgacaagccctttttattgtagtaacactttcagaaatacaggggccgctgctggcttctaccttttttcttttctcttttgtttcagtgtttgacaaaaactagttctgcatgtgcacattataagtatttaagctactatgtagatgactatgaactgttttcatactttagaaactaggcctttttgataacatgagtttcagtagtaacttctggcataatctttaactaaataagaagaggtcaagtgattctatagtttgtgactaaactttaaatgtcaactgtgccacctacctaaacagctaacatgtgaacattttaattgttatttctgaattcagtcttgtatcaaaatatatttacatcacacagtcccttcttccataagtattaaattcctggccatatcatattttatgtcaatgtgtatttccacaaagggcttcatattggcctccttaagttgaaaggaattaaacctgggaagtgatctctttgtttctgattcaagaaactaatgctaaatgcaggcttgcttttactcttaatgtagaccctcctgttacaagatgttttatgaggttttctggattcttttagtgaaccagttttagaagaagaaagcttatagagatagcagaggcaaatattgttcaatttttcatgtcagtttggttttagaagagtaatctttccacagttgtcagaatagtgatttctgaatctgaatacaccaggtgctccaacactgaagatttacttttgcaccattgtgtgatttctgtgatgaactgcttctcataaagggctatgtgcagcacaaaggcgagagaaagtcttaatctttatgaagctttttcttttttggatcctctgaaactgtagaatcagataatattcctcttttgcttttgaagtggtattatttatcttgttctcagtatctcttaagtatttacaaagatatgaacagagtgcagtcccctgacagcatttgatgcttactcagttaaattatagcatgctgtgggtgggtgtatatatgacatgtgcctttttgtgcataaataacttgaagcattttggtcagagggtaacctctcaaaagaagccggtatgccttggtttttcaagagcatctgcttattgtatttatatgattattctgtttaagtattttttttcctacttatgccagtattcaaaaatgcaagtgaaaaagtaaggggaagtttattcaaatagctgtgatatgaataatcatatctccagataatgaagcattctgatgcaattccctaaataatgatccatgttaagttgttgaatatatctacgcccacagcacacaggaattccagaatttctaccacgtgcttcaataggttctgtttacgactcaaaatggcctcttccaagttagtttttaggtggggttccttgaggttaattctttactcttagatatcctcctaaatcagacagattaaggtttgtcctataaccgtataggagcacattttaaaagtaactataaagcttttggccatattttgctatttttctccaaagtgtcaagattaaccagaggagtttaaaaattttcatccaaatcactactagggccatccacaaaactagagttacttcacacaataaatcaggaagctgtactctacataacatttgtaatatggatggggtagagggcataattctctgagaataagatttattcatacagatttgatttcctattgaaagatggcaatgctggcagtgttaattacaatgtgtataattaaagcctaaaaattaagagcaagatcacagattaaatggtctgtctgccaccaaatagtaacgtaggagtaccaaattgatgctgttattttttttttctctactaagaacaccttatgagcagtgagaaagcactttgcaccaatgttaaaaactctagtagatttcagaatataccattctggaagatgtgtggaagccattccattgtgtttgacacataggaagcctctttcaggaataatggttgactttgagattatgcaagcaggaggagacacaacattgctgtgattaaatgcatttctcacgtgcatttttctggtaacttgtattgttgctaaacatttaattttatttttgcttttatatttagactttgcaattgtgtttttcccccaaagcctctggacctcactcagatacaaatttataggatatttaagaccatgcaatcagtccttagggggtttgtaagtacatttagttttatcttgccttttgtgggtcattgaaaacatttactgcaataaattttctttggttattatctttcatgacatgaataaggcagcagttatgttttgctcaataagcgttggaaagaaaaggtccatttgtctgtcatgaggagggcagtgtcataagtgaatgtcatgatgaaaaaaacctaaggaatgagggaggctttggttctaaaacatgagagaaaccagataaacaatgaattcagttagaagaatccaaggatctaagatacctgttggattggaaaaaagaaattgaaaaggaaatgaagtagatgtgaaaatatatttagtgaaacagcatgtctgaaaatacaacgttcttaaaattaatatgaaaagatggaacataattgagatattaattttaatattccagttggcaaatgattgagatgcagctggattacaacttaaaagttttcctgggggaagggggaaagggataggaacatgtaatgatgcgttctaggaatctgtgtgaggtcaattacttgtacctcccccaccaagtaaaaaaaaggacatctcaatatactccttctttcatgactttttatctttcacctacaatctaagatgccaataactgtatgaaatctttcatattgaatcttaggtttagtgcttctccaattttgtccccttcactacttattttgacccagtttgaataaatttcttctttgtatgtctcttccttgtctgtaataattttatttccagtctgtaagattttctctacaaaacttctttttcttcatagttctctcagattatttggaagtgaaagatagaattctttatagccatctctgaaatactctatattatatgtatgaggagaagtatgggaagaatttccaggaagaatgtgatcagtctcaagggttattaacagttctgagttctaaaagaataatgttaatctataggattagtgattgtgtgaacttagtgtagagaaagtttgtcatgtgcatgagatcccaacaagtgttttattattctttaaaaatatttacttcaggaaagtttcttagtacgttatgtttgaaataatgatcttattattaagtatactttaattgttcaaatgatttgtaaattcaagggaagaaatttacaggctggcagcacaatggtggctgtttcgtcaaccacccaaagtgaggaataatgaacaaagtagtaatgtttgcctgaaaaatatagtaaaggaattagccgttgtgttgcaatatttgagtgactgccttggtaaagacagtgtaaatttgttcatttggtttcagatccactggaaccacagggtgaaagtttaagggagacaaatttttgcttatcccccataaatattttacattttgacctgctactggaaggagccatctcttactggtgaggtggaggcctttccaatgttggagttttcaggcagaggcagatggccttgtcccatgtgagacagatgaatgctatggccaagagataaggcaagacaatctctgaaatccaccaactgtatgattgtgatgataggtgttaaaggggcacatttgttatagatttttaaaaatctggcctgagtattaaggaagtaaattaacagattaaatagttagctatattcctaaaacagattatagatacgcatcttgacttccctatgtgacaattttcatagtgtaatttaatacatgctattttttgcttttctttttgttccctttctttttcttccatcctgtttccattccattcccttcccagccgtcccatctacttcctttttctctgtctcctctccttccctgtccctctcttaatctatccattccaattccctcctcctttctgttttcacttttattgaaagtgcccatcattagacatcctcttcagtccagattgaacagaataaaaactgtgcttccactactctcttttcatgttctttctattatctagactcactggctttagaaggtcactagcttggggaagtattgtatgactatcaacaaaatggcttaaggacacttctgcccccagttgataggtggtgattgtatcaggccagcgttagtcatacttgcagagctatttgtttcatgctcattagatacaaacattttgggtttagatgcctaggaatttacttgaactctagtatcattggtagaactgtagaaactggagaagtaattaaaaataaaaccattcaatgtttgtcagtctttgtccatgagtctaataaaagacttcaaaagctattgcttccataagaaaagacctcagccgggcatggtggctcacgcctgaaatcccagcactttgggaggccaaggcaggtggatcatttgaggtcaggagttcaagagcattatgaccaacatggtgaaaccccatctctactaaatacaaaaattagccgggcatggtggcgagggcctgatatcagctacttgagaggccgaagcaggggaatcgcttgaattccagaggtggagtttgcagtgatccaagatggtgccattgaactccagcctgagcaaaagagtgagactctgtctaaaaatgaaaatgaaataaaaaaataaaaggcctctagtttattccccagattccaaatgtgtcctttctacataaggcaaatttacctcaagtattctgagtacacccagaacaccttgaaataattaggatcctaatgatcatagtttttttttttattttactttaagttctgggatacatgtgcagaatgtgcaggtttgttacatagatgtatacatgctgtggtcgtttgctgcacccatcaacccgtcatctacattaggtatttcccctaatgctatccctccccttgatccccccacccaccaacaggccccggtgtgtgatgttccccttcctgtgtccatgtgttctcattgttcaactcccacttgtgagtgagaacatgtggtgttcagttttctgttcctgtgttagtttgcagagaatggtttctagtttcatccatgtccctgcaaaggacatgaactcatccatttttatggttgcatagtattccatggtgtatatgtgccacattttctttatgcagtctatcattgatgggcatttgggttggttccaagtctttgctattgtgaacagtgctgcaataaacatacgtgtgcatgtgtctttataatagaatgatttataatcctttggttgtatactcattaatgggattgctggatcaaatggtatttctggttctagatccttgaggaattgccacactgtcttccacagtggttgaactaatatatactcccaccgacagtgtaaaggcgttcctatttctccacaacctctctagcatctgttgtttcttgactttttaatgatcgccattctaaccggcgtgagatggtatctcattgtggttttgatttgcatttctctaatgaccagtggatgatgagctttctttcatatgtttgttggctgcataaaatgtcttcttttgagaggtgtctgttcatatacttcacccactttttgatggggttgtttttttcttgtaaatttgtttaagttccttgtagattctgaatattagccctttgtcagatggatagattgcaaaaattgtctcccattctgtaggttgcctgttcactctgatgatagtttcttttgctgtgcagaatttccttagtttaattagatcccatttgtcaactttggcttttgttgccattgcttttggtgttttactcatgaagtctttgcccatgcctatgtcctgaatggtattgcctaggttttcttctagggtttttatggttttaggtctttggtttaagtctttaatccatcttgagttaatttttgtgtaaagtgtaaggaagggatccagtttcagttatatgcatgtggctagccagttttcccagcaccatttgttaaatagggaatcctttccccattgcttgtgtgtgtcaggtttgtcaaagatcagatgattgtagatgtgtggtgttatttctgagggctctgttctgtttcattggtctatatatctgttttggtaccagtaccatgctgttttgattactatggccctggagtatactttgaagtcaggtagcatgatgcttccagctttgttctttttctttaggattatcttggctatacgggctcttttttggttccatatgaaatttaaagtagttttttctaactctatgaataaagtcaatggtagctttatggggatagcattgaatctctaaattactttgggcagtatgaccattttcatgatattgattcttcctatccatgagcatggaatgttttttcgtttgtttgtgtcctctcttatttcctggagcagtggtttgtagttctttttgaagaggtccttcacatacctttaagttgtattcctaagtattttattctctttgtagcaattgtgaatgggagtttattcatgatttggctctctgtttgtctgttattggtgtataggaatgcttgtgattttcgcatgttgattttgtatcctgagacgttgctaaattcgcttatcagcttaaggagtttttggctgagaagatggggttttctaaatataaaatcatgtcatctgcaaacagagacaatttgacttcctctcttcctatctaaatgcactttatttctttctcttgcctgattacccttgccaaaacttccaatactatgttgaataggagtggtgatggagggcacccttgtgttgtgcaggttttcaaagggaatgcttccagcttttgcccattcagtatgatattggctgtgtgtctgtcataaatagcccttatgattttgagatacattccataaatatctagtaattgagagttcttagcatgaaggggtgttgaattttatcgaaggccttttctgcatctattgagataatcatgtggtttttgcaattggttctctttatgtgatggattacatttattgatttgcatatgttgaaccagccttgtatcccagcaatgaacccaacttgatcgtggtggataagctttttttttgttgaggcagagtcttgctccatcacaccggctggagtgcaatggcacaatctcagctcactgcaacctccgcctcctaagtacaagcgattctcctgcctcagcctcccgagtagctggggctgcaggtgtgtgccaccatacccggctaattttgtatttttagtagagatggggtttcaccatgttggccaggattgtctcaaactcctgacctcgtgatctgcccacctcagcctcccaaagtgctgggattacaggcatgagccactgcacctggccagtggataagctttttgatgtgctgctggattcagtttgccagtatgtgattgtggatttttacatcgatgttcatcaggggtattggcctggaattttctttttctgttgtgtctttgccacgttttggtatcaggatgatgctggcctcataaaatgagttagggaggtgtccctctttttctattgattggaatagtctcagaaggaatggtaccagctcctcttcgtagttctgttagaattcgactgtgaatctgtctggtcctgggcatttttttggttggtaggctattaattactgcctcaatttcagaacttgttattggtctattcagggattcgacttcttcctggtttagtcttgggagggtgtatgtgtccaggaatttatccatttcttctagattttctagtttatttgcatagtagtgtttatagtattttttgacgatagtttgtatttctgtgggatcagtggtgatatcccctttatcattttttattacatctatttgattcttctctattttcttctttattagtctggctagcagtctatctattttgttaatcttttcaaaaaccagctatggatttattgattttttgaagggtttttgtgtctctatctccttcagttctgctctgatcttagttatttcttgccttctgctagcttttgaatttgtttgctcttgcttctctagttcttttaattgtgatgttaaggtgttgatctttagatatttcctgctttcttctgtgggcatttagtgctatgaatttccctctaaacacagctttagctgtgtcccagacattctggtatgtagtttctttattctcattggtttcaaataacttattgatttctgccttaatttccttatttaccccgtggtcattcaggagcaggttgttcagtttctatgtagttgtgaagttttaagtcagtttcttaaccctaagttctaatttgattgcactctggtctgagagactatttgttaggatttccattcttttgcatttgctgaggagtgttttacttccaattatgtgatcagttttagaataagtgtgatgtggttctgagaagaatgtatattctgtttatttggggtggagagttctgtagatgtctattaggtccacttggtccagagttgagttcaagtcctgaatatctttgttaattttctgtctcattgatctgtctcatactgacagtggggtgttaaagtctcccactattattgtgtgggagtccaagtctctttgtaggtctctaagaacttgctttatgaatctgggtgcttctgttttgggtgcatatatatttaggatagttagcttttcttgttgcattgatccccttaccattatgcaatgtccttctttgtctttttttatatttgctggtttaaagtctgttttatcagagtctagaattgtaacccctgcttttatttgctttccatttgcttggtaaatattcctccatccctttattttgagcctatgtgagtctttgcacgtgaagcttatgaagcttagtttggctggatatgaaattctgggttgaaaatcctctgctttaagaatgttgaggccaggtgcggtggctcacgcttgtaatcccagcactttgagaggccgaggcaggcggatcatgaggtcaggagatcgagaccatcctggctaacacggtgaaaccccatctctactaaaaatacaaaaaattagccaggcctggcaacgggtgcctgtagtcccagctactcaggaggctgaggcaggagaatggtgtgaacccgggaggcggagcttgcagtgagccaagattgtgccactgcactccagcctgggtgacagagcaagactctgtctcaagcaaaacaaaacaaaacaaaacaaaaaaatgaacgttgaatattggccctcactccctctggcttttagggtttctgcagagagatccactgttagtctgatgggcttccctttgtgggtaatcagcctttctctctggctgcccttaacattttttcctgcatttcaactttggtgaatctgacaattacgtgtcttggggttgctcttctcaaagagtatctttgtggtggtccctgtatttcctgaatttgaatgttggcctgtcttgctaggctgggcaagttctcctggataatatcctgaagagtgttttccaacttggttccattctttctgtcactttcaggtataccagtcaaacctaggtttggtcttttcacatagtcccatatttcttggaggctttgtttgttccttttcattcttttttctctaatcttgtctttatgctttatttcagtaagttcatcttcaatctcggatatccttccttcccctctatctatttggctatttctacttatgtatgcttcacgaagaatttcgtgctatgtttttcagctccatcaggtcatttgtgttcttctccactaaactggttattctagttaataattcctctaaccttttttcaaggttcttagcttcctttcattgggttagaacgttctcctttagcttggaggagtttgttattacccaccttctaaagtctacttctgtaaattcgtcaaactcatactctgtccagttctgttcccttgctggtgaagagttgtgatcctttggaggagaagaggcattctggtttttggaattttcagcctttttgcactgttttttttctcatctttgtggacttacctacctttggtctctgatgtttgtgaccttcaaacggggtttttgtgtggatgtcttttttgtggacattgatgctattcctttttgtttgttagttttccttttaacagtcaggcccctctgctgcaggtcttctggagtttgctggaggttcactccagatcctatttgcctgggtgtcaccagcaaaggctgcagaacagcaaagattgctgcctcttccttcctctggaagcttcatcccagaggggcacttgccagatgcctgctagagctctcctgtatgaggagtctatcaacacctgctgggaggtgtctcctcgtcaggaggcacgggggtcagggacccacttgaggaggctgtctgtcccttagcggagctagaacactgtgctcggagatccgctgctctcttcagagctggcaggcaagagtgttttagtctgctgagcctgcgcccacagccgccccttcccccaggtgctctgtcccagggagatgagagttttatctgtaagcccctgactggggctgctacctttctttcagatatgccccgcccagagaggaggaatctagagaggcagtctggctacagcagctttgccaagctgcagtgggctctgcccagtccaaaattcccagcgggtttgtttacattgtgaggggaaaagcacctactcaagcctcagttatggcagttgcccctccccccaccaagctccagggtcccaggtgtccttcagactgctgtgctggcaatgagaatttcaagccagtggatcttagcttgctgggctccacaggggtgggatccactgagctagaccacttagctccctggcttcagccccctttccaggtgagtggatggttctgtctcactggcattccaggtgctactggggtatgaaaaaaaaaactcctgcagctagcttggtgtctgcccagttttgtgcttgaaactcaggcccttggtggtgtggacacccaatggaatctcctggtgtgcatgttgtgaagactgtgggaaaagcatagtatctgggctggatagctccgtccttcaaggcacagtccctcatgacttcccttggctaggggagggagttccccaaccctttgcacttcccaggtgaggcaacaccccaccctgcttctgctcaccctctgtgggctgcacccactgtctaatcagtcactgtgagatgagcctggtacctcagttggaaatgcagaaatcacctgccttctgtgttgatctcactgggagcagcagactggagctgttcctattcagccatctttctcaggtcataatcatagatttttaattgatcccagcaacatggattagtaaacagcatatttccaagtgatttttttttattttaaggtcaaatctacaaaatattatagtgttatcaccacttaaaattattactggtgatactatgtttgtctctattcacattttattgctagaaagaattataatttgtagataataatagttatttgaaatgtattacatatccttttacttttaagaagaggtgacttaattatctaggtatacaattattttgaggatactaaatgtcatgaatagcaaatttatcatattgctttcctaggtgaagaccctgaaacaagaagaatgagaacagttaaaaacatagcagacttgaggcagaatttagaagagactatgtccagtcttcgtgggactcagataagccacaggtttttttcaattttgcatatatttgagccaataaagaaaaaataattacaaacaaacatttaacttttcttataatgacagagatgggatttcagtttccccttactattttctcccttgttttatatcaaattgattggtaattatccttaaactgagaattcacagtatatacctatttatcttttatctctatctctatctgctatttatgtctttttcagtataatttccagtactgcaactaccaccatcactgttaagtggatttgtaatacctgtcctagaaaacagtggcacaagttgcacttgaaatgcatctgggcagggtagtagggagacattcaaacataattgtagttaactttcagaataggtctgggaaggttacagtgagttaaggatttgttgaaaatgtaaaacaatatgttgttttacccaaggtgtactgatggcctttcttttgaaaacaaacgaaaagctataaaatgtatgcccctttccacaatttgacctcaaaatgaatatagagtttagctttcgggaagatgacgtgtttataagagatgaccctcaactccagccttttctgtcttcatgcattctagattatggccctaagtgaaccagagtatagttatttctccattttatttgacagcaccctggagacaacatttgacagcactgtgacaacagaagttaatggaaggaccatacccaacttgacaagtcgacccacccccatgacctggaggttgggccaggcatgtccgcgacttcaggcgggagatgctccctccctgggtgctggctatcctcgcagtggtaccagtcgattcatccacacagacccctcgaggttcatgtataccacgcctctccgtcgagctgctgtctctaggctgggaaacatgtcacagattgacatgagtgagaaagcaagcagtgacctggacatgtcttctgaggtcgatgtgggtggatatatgagtgatggtgatatccttgggaaaagtctcaggactgatgacatcaacagtgggtaagtaaccctgttctccgtcagcattgtgtgaagaggggaggtggtctactataatgcattcactataaacaaatgtgtaagtttgcccagaaagtcatgagaacatatgagatatctgaggttattcagagtgttgaagggcccttcctctgctcattcatggagagtaaagaatccaagatttctataaattcattataagccgctaagtttttctgttgttgagagaaacacatgtggcttctgtttttcagagtgattttcacatgcttcttaagtaacagattttgtagttaaggacgtgggaaggagacaggaggagttttgctgatttgcttgattttttttttcttttttagcttgttagaagctgcctgtaactgctttgagaaacaaatattttcttactgtcttcaattatgcatccccaatttaacttgagggaaaaatcactttggagttgaaagtttcactctattcattttcttttgatggtatcagatttcaatacatctcagaccctgtttttcttctgtgtcctattacattccaaaacatgttgtgattgtaaaactcttagagtatattaacaatttgggatatttggcataatcagagaataggtccaaaaggaggcaataggatattctattaataattgtaattgccatttttagcatttcctgttatgtactatgctcttgtcaagtgctttgaagatattgttttacttttccttcccaccaccagcaatgtttatgaggtagatgtttttatacatgttctatggataaggaaactgagtctaattggccccggctgggaactaacgctagggaaacggcagacctgcattagaactcagctatgtctgacttcaaacacaggctcagtaatatgtggaaaagcttcccaattaactttgtctataaactttgtgtgagtctggattttgacttactctttgtctttacgcatctgagaggacccatgtaggaaataattcttctatataagtgacccttcctgacttcattcatgaaaagcttatgtttgaagggtgacacgacctaaaaaagagtacaaaatagcttttgattacatttatagctttgctctgatatcccaatacctactagtccattcctggtatccaccctacctgactttctaaaaatttagaattatagagactaattatgattaattaagataggttgttgttcagttgccactggattcagagtgcctagtttgaatctctcccattcactatctgtggaccccttcggaacctaacgtatccaaattagtttttgtcatctagaataaggataaaattgtaccatcttcatgaagttgttaggatcatccacaaattttagtttgcgcaatgcttggcatgatacaagcactcaataaatttatcatcttcctctttatcatcactattacatttattatcattaataaccataccaatttttggttgttgttagttataattatcatttttgtatgtatttaacatagcctaggaggcaatgcccagttcagaaaacataatggcaaagcaagagtgtctaaggcacactctttctcccatctctctcttctttcttctccattctttccactctatcccctcttctcttttttttctcaatctccttagatgtggacatatgtgtgaattcaattttataatcactattcaaatatatttatatggctaattatatacataagtatacccatataatatatataaagatatatataccaaggctgggcacggtggctcatgcctgtaatcccagcactttgggaagccaaggcagatggatcgcctgaggtcaggagttcaagaccagcctgcccaacatggcaaaaacccatctctactaaaaaagttagccaggcatggtggcttgtgcctgtattcccagctacttgggaggctgaggcaggagaaccacctgaaaccgggaggcagaagttgcagtgagctgagattgcaccactgcaccactccagcctgggtgacagagtgagactccgtctaaaaatatatatatatataatatatatatgtatgtatgtatgtatatgtatgtgtatgtatgtatatatacctatgtgcactcaatatcattattcatggtacttctcttctatgaagtcaccacaaacactgcattagtgaatcctgaactattgcccctagtagagatataggttttggttcctgtgagcatttggccacaatatttttgtcaactgatcaatacataaacttgctttacgtaagtctctctttaaagacaccttatttaatacatactattgattcattcacgtggaactcccagccaacagcactataactaaggccggaatgaagcttatctagtgcatattttctctgtgagatgcattgaagactgcttgcaattaggaacataatatgacacttcagcaccaagtttgggggccactttaaacagcacaattctcagcataaaaacacaaaaaatgtggaaaacatggcactaaataggccatagaagaacatttgttgtgatattagagctgatacaagaacacagagtatcactttatttagccttagctggaaacgtctgagactcattttttttcacggttctgttcatatccatgaatggctgtgaaagtgctacgagtttagattttgtggctacatataaattttagcaagtaggcaacttcacgaatatagaatttgtgaataatgatgattgacaatatatactcacactcatgtagaatgtttatctgtagagtgacagcatatcttgggagcagtttgaataagaaatcaagggacatctacagtgcaatatgttgggaatttcaaaaggcttatagggataaaaattgagctaagagttcagaatgaggagaaagtactaaaccctcacatgaaatagaaagcagtgaataagaaaaagaaacattttagttattttttctgatttaagagctatagacaaaggaaatatatttaaaatacatatataagaaaagtacaaacatagaaggtataaattattcagtaaacttgcataaaatgtaattttcagaatcaaagggacagtggattagatgatattgatgatttttctcttaactgagagtcatggaacatgaatatttaaagataatgtcttagagataggcactattttgacagaccttaacatcattatgctaagaagtttaaactacattataagctatgtaaaatactatatcttagagattactaaacagtcatagaacatggcatgaggatggtgatggcttttgaaggccactttatgggaaggaaatatgcaaagtgaattcaggggagaaactcgggggttcaatttcaggaactagtgcaagagctctggctcaagctcataagattagaaatatggtagtggcatttgtagggataaaattaggaaagtaattgatatgggaagcactgcaaaggaaaagtttatagaaccagagatggactacccatgaaggcataaggcagacaagaattaagatacctacatcataagcacaggagatggaaaatagtaccgttagagaaaatcggcagagagagaaagagagagagcgagagagagaggattttttgatgagaaagcagagagagagatgatgaatttagagttagagatgtagagctggagacggtgagatatgaagattgtttgtccaggatagagatctattgtatttcatctcaataaaagagagcaggaattgtgggaggcattaaggctcctgggaaaagaatatggaaagaacagggatcataaactgaattatgtatatatgtatgtatacatgtatatgtctattaaaaatatttatcgagttcatcctatgtgtcaagcaacattccaggcactgtgcattcagtagtgaataatatagacatagtacgtgcccacatgtgactcacatgatggtgttttcatatttttgtagcagtccagttattcagtaaattaattgtaatatgcacacatatgtgtatatatacatatatatgcacacatatgtgtatatatacatatatatacacacagagaagtattcttaaacagatagttgttttaaacgttttttaacaactgaattctgcatataataatatatgttacaggcatattgtactcaggagcactttatattttgcaagaatacatgcaatatatgcaagaatacatgcataatatgttaactatattagttaacattgatttcgaaaacagagaaatctcaaaatctcagtaacttaacacaaagaagctaatttgttcttcacataaaaccctcgctgatgtttctgatcttcacctggggaatgcactccatgtagtcattcagagaataagatggatggtaattctgttgttacccagccagatttccagtgttaccctaggcattgatattcaacaggcaaatggcaaaagaggggaagacccagggtgtgagaagattttgtatgtatcaggcctggaagtcatgcatatgagttctgcctgcattcatttgtctagaacagctgcatgaccacatctgactgtaaaagagactaggttatatggttcagctgtgtgcccaggaggagagggaaattggtttgatgacatctggctagtctctgctgaactcactaattttttaaaaaatgctgttatagactttgtccttcttatttgtttctgcttcatttaaaacatgattcagacttcttgtttcctctatttttgttccctaacatctttcaaaaaagtcttggatagtctcacaaatgagtccatttaaatatgcattgatggtctacatgtcttatgttgacaagtaaaaatacctcaaatcctacatgaaacttcccctgtttactcacatacatttgttctttcctatgttagagtacaagacactgaaatttaagtcatgactcagttctcttacctgtgcggaagatgctaagatctgatcagcagatgatgaggctggtcttagctcaaggatgattgtgcgaggatacccaggatgtgctggacttattgctcatcagcttatgcagtgtgcccttgttggcttacgtaggaggcagccccaaaatctcagcctagaattaaaacgtgagaagacaagagggctggagatacccaggaaaagtttaatttgatggtgtttctttaagaaaagggggcttagaagtatttatgctggccgggtatggtggctcatgcctgtaatcccagcactttgggaggctgaggcagatagatcaccttaagtcaggagttcgagaccatcttggccaacatggtgaaacctcatctctactaaaaatacaaaaattagctgggcatggtggtgcacaccagtaatctcagctacttggtaagctgaggcaggagaattgcttgaacccaggaagcagaggttgcagtgagccgagatctcaccactgcaccccagcctgggtaacggagtgagactctatctcaaaaaaaacgtatttatgctacgagtcatgaaaaagttgaatcataaatttaactctcttttcaaaatgtttaaaaatatgttttaaagattaaaggaacaaaaggctcaataaggtagtaatgaatgaagatgtttaatttaggattttctcatgtaaccacgaagaacgtcatgaagtcatttaaatgggaataaagtttcatttttttccatgtactctaggtgtaactcagaaagttagttaatcagcattctgagaattcaaaatttcttgaagcatgcgaaggcttatctctttctcctctttttgaatttactttaaacactgggggatatgaatctgtcagtaattaggaattagtcagagaaaggcctcttactcataatgaacctctttgaaaagtctctatttatgaagttaaaaacaccctggaaaattgggataaaagttacatattttaattgagtggaaattgaagttatcttcaggtgtcacagtaataaatagttgggccaagaatataacctaaaattctactttaagtcacgtgaccaaacacaaactaatctaagaattctgtggagtaaaaattaaaaataaggcacagaagtgaggggtagatatactttaatcctgcttctgccttgatcctccctcaattctcatttagtaaactttgtgatgactgaagtatgcataacagtgtgcaaaaggtcagagttacttgagctgtgttaaaaagatccatcttttgcaccacagattcctaatcttaatgcttcctctaatttcactttcaggatatgagctattttagtgactctagaaactctaatgcataaaatagctagtatttttaaagatagtatttatatgtcacttacaatgtgctagacaatgctgtatgcatgttatatatatattaactcactggtagctcaccatcactgcaagaagtgagcatatcattgctgtttccattttacagatgaagcaatttaaacatagcttgtttaagtgacttacctcagcccacacagctagtaagtagcagcactgtagttgaacctaagcagtctggctctggtctacactcaaccatccttacacactgaccttaggaaactgtctgcatgtctacatgtaagggtttctctcctaggtgcctgatttttttccaaacaatcatttaaaaaaggttcacagcaatcatttgttatcagcatggattttgtagctagcacatttaatgtaaggggcatttttaaatgttatctatgccactctaaaggaagatgctgaactggagtttctttaagggagtggtgaggatcactttagattctctgtgtgtgcatgcaattacaaattaactaattgtgacagatagcagctgatatgagatattaaatataaaaacatagaattctaggaagatggctctattagtgtgttctcactctgctaataaagacatatttgagactgggtgatttataagggaaagaggtttaattgactcacagtttcacatggctggggaggcttcacaatcatagtggaaagtcaagggacatattacatggcacaccgcaggcaagagagcttgtgcaagggaactcccatttataaaaccatcagatctcgtcagacttactaccaggagaacaatatggggaaaactatccccgttattcagttatctctatctgccccctcccttgacacatggggattattacaattcagggtgagagttgggtggggacacagctagttgtgacagtgcagtgacagcagctgatatgaggtattaaatataaaaacatagaattctaggaagatggcagatatggtggaagtttaggttttgatccattactcctatgacctcttcaaaaacagtatttcaaaaatgaaattttctttcttttaatttcttaagagttatattatctgcaagcctattcataatattaataacaaaagggaaaaataggttctatggtaggctagttacttgtcgcagtaactactactaggaaatattgatacaaatactaggaaatattgatttcctagtaaacttgaaaaaatattttaattatccctggtgagtagaatgtttatacagaataaaaaacaagataatagaatatatttgagtaattattgaaaattgtggacaccgtttgtttattaagttaaattgtacagttgagttgatttagttttctgtgaattaattagacatttcttttcaggtacatgacagatggaggacttaacctatatactagaagtctgaaccgaataccagacacagcaacttcccgggacatcatccagagaggggttcacgatgtgacagtggatgcagacaggtaatgctatcagcatatatgatggtgagacatgcatgaagtaattttataaataagaaaataacagaaaactcctattaaacagtgtaaatcaaaggactttttattttgataaataattattttattttgataaataattatttagggtttttttgtttgtttgtttgttttcgttttttttgtgtgtgtgagacagagtcttgctctgtcaccaggctggagtgcaatggtgcaatctcagctcactgcaacctctgcctcctgggttcaagtgattctcctgcctcagcctcctgagtagctgggactccaggcacgcaccaccatgcccagctaatttttgtatttttagtagagatggagttttaccatgttggtcaggatggtctccatctcttgaccttgtgatccacccgcctcggcctcccaaagtactgggattacaggcatgagcctctacgccccgcctatttggggatatttttaaaactaggatgattttctttacaaggccattttagctctgtaataccaaaaataaatgtatggctggggagatttttttttaatttcaggtaacatagttgcaaatgttaatatctataaaagcagaattataaacatagacttattttccttgttagaaagaaactctggttaataagtttcattcagttcagatatcctcagatttacctggaagctaatgatataaagattaaaatatatttcaaatcatctagtataataagcttgatgctttccttgaaggtgttgtaaacatagaaaaactcttactttaggcttatttttgcttctttattgcctcaaatttcttaaagatgtgtgtgtgtgtgtgtgtgtctgtgtgtgtgtgatgaactaattattttgctggaaattgctctgctgatttatcagaatcatcactgtttaagaacattgctttggtaagataatgttgtaatatacatttctggcctgattttgctccctcttcactcagaattttgactttgttgagcaggaagggattgcatattttcagaattattatatctaaatacctagagtagttgtttaattcagcatttatgaaaaagacaaaaggttaaggtgcaatgtactcacattctgaaataggaactgtatacaattcattgtgcatttttgtacagtcaactccaaaggctagatacccagggaattctaatattagtcttcagtttctccttacccacaggctgttgatatcctgactcatagtggttagaacagtctcagctcccaccctgtctgtatcctactctcctagcctatatactcttgtgtgtgggtgtgggtgtgaagcatgtgtatgtgtgtgtgtgaagcatctccccacctgtaatgtaagtccatgagtgcagaatttttgtcatattctttacgtgttgagttttaacaaatgtttgtggagtgaatgaacaaattaatgaatataggctatttattaattaggcaatatagtcacataggctggcaatcgcatctaattaaatagagtggtaaatgagttccagaaagaactaaggtactacaaggatgttatgaaagagaaaaatgagttatgtgaaaaataggagacagtgataagagggaaagaatcccaaagtgtgggccacattttgaaactaatgacctattattctattattgttagctgaaagtagaaaacgtcatgggagggaatatctgctagtttttggtaaaggatgttgtgatggcagaaccaagaaatgaacacaaggtgactttggtttggggacagtgggataatcaactctccttgctccatcagggccccagactgggctctggcagaggaactcagaacaacgtaaagacctagataggtatctaataaattgggacctgtgaaaacagtgcctcttaaagtgtggtacctggaccagcagcagcagcagcagcagccattgaaacttcatagaaagacagattctcagcttcatccaagacttactgaattagaatatctcaaggtaaggcctggtaatctgagctttaactagccctcaaggtgattcttaagttcaagcatcactatattaagttgaacaaatagatgccaggcctataaatacatgtaacgcctagcataaatatttcaacattaaaaatgacatttcatagttcttatttaccctattagctgtgttctgtcaagataatgagaatattgatatgttagaatacactgatggcactaatttttaaattagatcaaataatgacttgttatacctgaaataaattggttcagcttggtagatgcagtttttgagaattatataagtcatttttaaaagaataattttaacttgagctgcttgcataaattaaattgcaaaaaggtcatagtataaatcctcctattagcagagatagaaggtttttaaaaaaattacagataagtctgaaggtcttttaaaatcttatattcaggaagtgactcgggatgtatatcattttaaaatacatggtcttaaatgttgtagttgtatgactctttcagttaatttaaaatacttccttctatgaaaaattgtttcaaaaatttttctaaattctgttatccatttcaagtaggataggcaagaacagatataagatactacttttttgttcatgtttactaaaaaaaaaattactgtaattgagatcatgtaaaaacatgtttcctgtctatttgtcttaaccttttaatcctggcaccttaaatttgacatagtaggaattagaagacaattgcagaaaatgtcaactggggaaattttattctactaaaaactatgtccatacaacatagcaaatcacattttaaaggccaaaaagtctttcatagcaatttttcagattattttcaaagcatatcttctctctgctcctgcagcatgccgttgatttttctgttatgcagtcacataagtaattacatgtttacatgtctatttcactcatagaacacgaaacagttaaatgtagaataatatccaatccatctttttatcaccagtagctagcatactgtaggaactcaataaatatatcagataaattgtggaaataaccatatcagcttataacatatagaaatgtgagtttaaaaagaaaacaattatacatatgaaaaaatttttataccatttttttaaagacctttcagatgtcatacagtttggacttttccagtgtttcttgtatcatgagacaatagtagacattgtaaatcaaaaatagttttctggggttgtgtacatttgaaaaaactgaatatcatatctgttcttagagagtaatgatggatattaacatatcaaaggtacagagaagtcttaaagttcaaagtaacatctgcttaattgtatttaattcagtgctccatgagcttttttatcactgattccctcccttttttctcttatgataataattaacttgttcctgtagcattttaagaaatgttgatttagttgaatgccttcacttctccaatataatagcagaaactcagaaatatttatttacccagaatcatgcagctaatagtacaaggattcaggtcttttacttcctattttgtggttcccaactacttttgccaaaggtcttttaaataatatgaaacatattagtgattgattcattatagtaaatgggtaaatgataaggcttgcaataattcactgacaagaaagcttaaaagtcaaaagaaaaaaaaatccacagcatttttttttcttagttattctttctaaaagctgtgtaagtgcaaaagcagagtcatagcacaatggcagccagccagctacctagcatagcaatggacttgaattgtttgtattgttatagtgaaggctatagtttccctttgatcaacttctggttaaaatgtgatggacattagagaacaactgaattcctcttaccagcacattaaaaaggccccaaaggaaaaatgaggactttcagcagccatctgtagtatattttaaatattttattgcttaaagatattgcagttcatttactttccatatcaatccaacaccaaccccatttctgtatttacttgactaaaaaaaagattgcagaatgggtataatccttgcagatatgttggagactctccagcaacttcacagatacatttatagctggcagttaaatatgtgggttttatacattgtgttgggctatgtttaaagggtacatttttggggactgcaggatgattgtggttttgacctttattaactcctattattgttcttactctagattctatgctaacaatcacaaatattttataaacaaatatatgattacttcctaagtgcctgtcatcatagtagcaccttgggtaaaaataaaacaaaacagtatgggtgaaagttcctcagtttaatggtaagagagagtaatgtaaacaaaggcccctcttaatagatgtctatacaatgtgccttagaagcaccaaagagaaacagttactcctacctgggagtataaaggaaagacttcaaaacacagtagcatttaagcagggtcttaaagaaagcatacaactttttgacatccagcctgggagaaatcagaaggaatgtggggagtgagagcataaaggcatagaagagtttggtgtgaggaaccagtaatgggattctgaagtgcactgggaatgtggacaaggagacgagagacaaaggacctgggggccatactagggtgtttggacctataggtgataaggagctattttactaagtttaattagttttatttcatttcaaggcaaaagcacatgctataatcattgtattttaaaaggaactctcatagcaatgtaagaacattgaagagggatgagataaagacaggtagagtgcttagaaagtgactaaaataaattagatgagcacctaactaaagaatggcagtggggaagggggctggggacaccatctatttctagaggaacttgggttttgtctatgtgtatgataatccttggctgtcataactaaataccacagactgagtggcttaaacaatagacatttagtttttcacagttctggaggctagaagtttatgatcaaggtgtcagcaaatttgttttttgatgagaactcttcctgacttccagagagtgggtttcatgctgtattctcacatggcctttcctctgtgctcctggagacatctatctatctgtgtctgtctgtctgtctgtctgtctgtctgtctgcctgcctgcctgcctgcctgcctgcctgcctgcctgtctgtctatatagagagaggtctttggtgtccctctctcttcttataagggcaccagtgctattagattaggattccacccttatgtattaatttaacctgaattacctctgtaaaagtcctgtttccaaatacagtcacattgcaggttaaaaattcatataaattagggggtggagacataattcaattcataaccctgtgtaactcccaggtggatatgtccttggggatataaggtcagtcactatatatgtgctggattaaagtattagtatgtataataatcatatatataatctagatcatatatacgagtgtatacaaaattagctcgtatacaagctctagattgtatatatgcatatttatattgtaaattgctgcctttggaaatgcgtaaatgtggaaaagagagccagggattgccaaaccatttgattttgtttttcaagtgaagccaagagtctggactcttatgagaagtttcccaatttttaagtattagaactctcctaacagatacgtaagatcaatagatacagttaaagacaaaaaactttcttcagtgggagaaaaatctagaaattcacagacatggttatataaagcaggagagagtgaagattgcactcatggtcctgtaactgtcctagttccttgaagtttctcaccgagatagagctggtgatgataccacctgtgcagagtgaaaattccaccagtcatgagaagcctgcccagcaggtgaggtaactgtggcaaaactatctgagctctttttggagattttaatgcaagacagcacaaatctaaagtcagcttcccagccatagcatcactcagtagagctggcctcctgcctgcctgaggccgattatgacagtaatgaattaaattttgtttaaaccactctgtgactctgcactgtgcaagctaggaacatttgtatctcaaatgtacagtaagaaaacaagccctgagaatgaattcttagcattgaaagagtgaataaaggaagaacaaccattggagagacagagaaatcagctttaacacaaagatcaaaggacaaccagggttagctgatattttttgaaatggagagaagaggaaatatgcaatactatacaattccatggataagtgatgtttgacaactggcaactagtttcttatcagtggctttatcaaagttagtttcaatgaaatactgaaggagcatgctaggttatgaaaaggtgaagaagttaggaggttgaaacaataaagggagatcttcaggaaagttgcagggaaggtaaggagaaagatcagatagaagtcaacaaaagggacaggatgaagattattgctgatttgctctgttttgttttggggagaaaggaatttgatctggtacagagagtgaattcctagacaaaataaggtgataagtcttaaggaagatagaagaatctgggaaaagattactagaactgctgtagatttaacatttatctcctttccacaattcatgtgttaaaacctagtcccccttgtgatgatatttggaggtaaggtctttgggaagtgattggatcacaagagtggagctctcatgaatgctattagtgtccttagaaaagaaatcactagcaagtgccccttagcctctcctgccatatgaggttacatcaaaaagtcagctgcctatgaaccagcaatcaggccctcttcagacacaaatctgctggcaccttgataaaggcttctgaaaacattaccttgaagtccctgagcatgtttaatgaaaggaaggggatcaaagaggttgattagaaggtttttaccacaaaataaaataaaataataataaatttcacatttgagaggtagagatttactgactggttgaacaaattgcaagctataacctgggttactgaagtagaatgataatagaagtcaaaattaggttacgtagatgattcatccaggtagctattcagtcaatatgatggcaaaatgaatctcaaaggagagaaaggcaaagctccagataccatatattatattgaatatgaacaaaattctacaacttgtggtaacaaagatacctttcaagctatattttgggttgtctgtcacattgttatctaaactatattcctaaatatagtgattgctaattttaattataaactaatcaatataacttcacatttatactattttcatatataatcatgcttttattgaaagtataaaagcataatacatcatagaaattatttttgtattgtactacttgatggattgttttgatttgtgaaactataatccagatgctgaaatcacagtttccaaaaggcattaaagattgtcatgtttttatgtgactctgaggttgccattgtaactcatcatatattgaagcaggcctaagttcaaatctaaatacatagttaacactaaatatctaagtctgcaattgttagcaatgtgcagaaaattacattgccatgacaaagggcaccatgccagttctcatgaaatcatgggggcatcagttataagggtgggagacctttatgatttccaagccttttccaactaggaaaagtaaaggcaacagagatttttcctaagccgccaagcaaatatctctgggatcaggttcatgatgcttgtcactagtgtgtgtaaactaatcattcattttatccatgttgatttgttccagtacaatcacagaattagtatactcccatgtcttaactatttccttcattagcttactggctctccatagtaattaaaagcaaacacaataaagattaacaggctgagatggaaagagacaaagtaaatataattacttcattttataatcagatggcctgccttttctgcccacatttctttactctaagagaccaatgcaaaataatagggacgtggaaaaactgttattgatgccctctcaaattccctttgccattctgctcatgattgcaagaatatgaacaggttctggacttctcttcaaatcttaaaattaactgtgcccattgtgaataacctcagaggcttccagtacttttttataatgccccttaggaaattaattcataccacatccacatgttgagaacctactctctgccaatcactgtgctcaatcctgggctttttattcaagagtcttatattagaagagcattagaatagggattgttaaacctcaattgccattgaaattcaaaagatccttcaacactacaactggcccaagttgtagattgtagctctaaatgctattttttcataagactcaccttgacattaaacttgatcaatttttaactttaccattatagaatgattctcccaatacaagagatggttcccaggactcttattgatgtataatttttatcttatctgcttataatagaatttactaatgaatcttatgaggatggtaaacatattgagaagaagaaaagaggaagaagaaaaggaggaaaggaggagaaaagaggaggaggaagaggaggaatgaggaggaaaaggaggagaacgaagaggaggaagagtagtcaaatttgttataataacaatagctataatagacataagtattgaggacctagtgtgtgtagctaacataccatattacttaaatatattattttactttatctttacaatagccctataaagtaggttttattactaccattgaggcaaataattcttacatcaagtagcttacccatagatactttcttaataaataataattgcagaatttgaatttagatcttatgttttaagtattattcataaaattattaatttagataaaggtttttatcatgcctggatgaaatattttgacttcataaattatttaatttttccattttgacctaaacatatctatactataaatagtttttttaaaattcagcttcaaaaaagttggtaaattaattcaatgtataatggtatctatttccattgcagattgtcaatagatcttaaaacacaggtgacagaacagtcatttcacatgtgtgagagcgtctaaaaagctagttagcttgctgatatcaataaagcaatttaacagtgttttgttcttttatatatattatatataatatataattatatataattacatatatataatttataatacatatattttatatataatggatgtaatatatataaatctgtcattatcttgaaatctaattattactgaaatatctatttctaacaggctcaggaaatagaaaaatggaagagggagaaatatgtttggctcataaaatgaaaaatactaaaagagcacttatatgagggaaaaaggaattttggtccttttatattacatgatattacttttcatgatgagagatatcctagctaattaaatggttaattttatttaagaagttatatctatacatgaaacacttcgttattttgccttcaagaactaggcatgaattcttttttttttttaataggctaactaatgggttcagattttcaatttgggatcattaaattgaaggcattttggccggcagctgataaattctgcatcttcctcactccggctgcatagagtgggtggcatggacttatttattagaggcatatgggttccatttatatttttttcttgcttgacttaatttgcattttaaatagttaaagttatttgcaataagcttggttttttttaaagccttaccagagctcccatatgtttttttaggataagttgtaaatgacagtgttttcattataaaattattttctaaactaaatcgttttttattacaaaacttttctaggtttattaatgaaaattcacagagtatacaaaagtgtgaagaagaatctaaaaagaatctgtaatcctctcatcccaaagacaaccaagaatattgcattaagatatttccttctaggcttctttaccctttctatttacatagtttggttacatcatatatatagtatagtaccctgctttcttcactgtatttatataataaataatactgtgtaatattagatattatttttgaatatgatttttaatgattgcatgtccttctgttatgtggaataaattacatatctaaagagctagtgcaataaaccattaaatttaaggtattcatcacatttctgatttatatgcagaacaattagcagaatcctatctgatctggttgtatgactatattcatgaatttgttttctaaaaagatcaaattttgaacttactaggagatgcctcacatatcgtgtgtgtatgttagtgtgggtatatgtgtatgtatatatatacatacacatttggtatttttctatacttgtttgatgagataaagatttacaatttttagatttttaatttcaagtatgtatttgtaaactatcaggaattatagtttgttgcaattatgaaatattttgtcagttaggttttcctgctgacaagatagatgataaaacctttttactgaaactatgcttctttatgaaacttaattaaatatccaggagttccttactttttacagaacaaaactctatcatttgtttctctaagagtatattttactctaacgtcagacacgttggactagccacatctacctgactgttcaaatatttgctaggtaaaaataaaattatttataataatagttcccttcttgaatatttggttggtgccacatatattgctgagtacttcacatgtgcgaattaatttaattcccataacaaccttctaggtttgatactataatcaatgcctttttgcaaatgaggcatgcaatgcacaagagactgaaaaactttctcaaggttacaccactagtaaatgccagatgctgggatttatactcaggtgaagttttttttttttttttaaagtgcataagaataatgacgtcaataatattttaattattttgaaattgtttccagcttcactcttgatcacaagctagtgactagaacaggttaatcatagtgaaaactaatagatatgctgtttaaatttcttttttttattattatactttaagttttagggtacatgtgcacattgtgcaggttagttacatatgtatacatgtgccatgctggtgcgctgcacccactaactagtcatctagcattaggtatatctcccgatgctatccctcctccctccccccaccccacaacagtccccagagtgtgatattccccttcctgtgtccatgtgatctcactgttcaattcccacctatgagtgagaatatgcggtgtttggttttttgttcttgtgatagtttactgagaatgatgatttccaatttcatccatgtccctacaaaggacatgaactcatcattttttatggctgcatagtattccatggtgtatatgtgccacattttcttaatccagtctatcattgttggacatttgggttggttccaagtctttgctgttgtgaataatgccgcaataaacatacgtgtgcatgtgtctttatagcagcatgatttatagtcctttgggtatatacccagtaatgggatggctgggtcaaatggtatttccagttctaaatccctgaggaattgccacactgacttccacaatggttgaactagtttacagtcccaccaacagtgtaaaagtgttcctatttctccacatcatctccagcacctgctgtttcctgactttttaatgattgccattctaactggtgtgagatggtatctcactgtggttttgatttgcatttctctgatggccagtgatgatgagtatcttttcttgtgttttttggctgcataaatgtcttcttttgagaagtgtctgttcatgtccttcacccactttttgatggggttgtttgttttttttcttgtaaatttgtttgagttcattgtagattctggatattagccctttgtcagatgagtaggttgcgaaaattttctcccattttgtaggttgcctgttcactctgatggtagtttcttttgctgtgcagaagctctttagtttaattagatcccatttgtcaatctcgtcttttgttgccattgcttttggtgtttcagacatgacgtctttaatccatcttgaattgatttttgtataaggtgtaaggaagggatccagtttcagctttctacatatggctagccagttttcccagcgccatttattaaataaggaatcctttccccattgcttgtttttctcaggtttgtcaaagatcagatagttgtagatatgcggccctcagcaaatgtaaaagaacagaaattataacaaactatctctcagaccacagttcaatcaaactagaactcaggattaagaatctcactcaaaaccgctcaactacatggaaactgaacaacctgctcctgaatgactactgggtacataatgaaatgaaggcagaaataaagatgttctttgaaaccaaggagaacaaagacacaacataccagaatctctgggacgcattcaaagcagtgtgtagtgggaaatttatagcactaaatgcccacaagagaaagcagaaaagatccaaaattgacaccctaacatcacaattaaaagaactagaaaagcaagagcaaacacattcaaaagctagcagaaggcaagaaataactaaaatcagagcagaactgaaggaaatagagacacaaaaaacccttcacaaaattaatgaatccaggagctggttttttgaaaggatcaacaaaattgatagaccgctagcaagactaataaagaaaaaaagagagaagaatcaaatagacacaataaaaaatgataaaggggatatcaccaccgatcccacagaaatacaaactaccatcagagaatactacaaacacctctacgcaaataaactagaaaatctagaagaaatggataaattcctggacacatacactctcccaagactaaaccaggaagaagttgaatctctgaatagaccaataacaggagctgaaattgtggcaataatcaatagcttaccaaccaaaaagagtccaggaccagatggattcacagccgaattctaccagaggtacaaggaggaactggtaccattccttctgaaactattccaatcaatagaaaaagagggaatcctccctaactcattttatgaggccagcatcattctgataccaaagccaggcagagacaccacaaaaaaagagaattttagaccaatatccttgatgaacattgatgcaaaaatcctcaataaaatactggcaaaacgaatccagcagcacatcaaaaagcttatccaccatgatcaagtgggcttcatccctgggatgcaaggctggttcaatatacgcaaatcaataaatgtaatccagcatataaacagagccaaagacaaaaaccacatgattatctcactagatgcagaaaaagcctttgacaaaattcaacaacacttcatgctaaaaactctcaataaattaggtattgatgggacgtatttcaaaataataagagctatctatgacaaacccacagccaatatcatactgaatgggcaaaaactggaagcattccctttgaaaactggcacaagacagggatgccctgtctcaccactcctattcaacatagtgttggaagttctggccagggcaattaggcaggagaaggaaataaagggtattcaattaggaaaagaggaagtcaaattgtccctgtttgcagacgacatgattgtatatctagaaaaccccattgtctcagcccaaaatctccttaagctgataagcaacttcagcaaagtctcaggatacaaaatcaatgtacaaaaatcacaagcattcttatacaccagcaacagacaaacagagagccaaatcatgagtgaactcccattcacaattgcttcaaagagaataaaatacctaggaatccaacttaacaagggacgtgaaggacctcttcaaggagaactacaaaccactgctcaaggaaataaaagaggatacaaacaaatggaagaacattccatgctcatgggtaggaagaatcaatatcgtgaaaatggccatactgcccaaggtaatttatagatttaatgccatccccatcaagctaccaatggctttcttcacagaattggaaaaaaaactactttaaagttcatatggaaccaaaaaagagcccgcatcgccaagtcaatcctaagccaaaaaaacaaagctggaggcatcacactacctgacttcaaactatactacaaggctacagtaaccaaaacagcatggtactggtaccaaaacagagatatagatcaatggaacagaacagagccctcagaaataaatttcaatttaatactaaatttgtggaatatgttggtacagttgatgattttatagcagagatatgttcatactcaaatattatactagctttgctgcttctgaaactgtacaaatatattattgaaaaaatgtcttaaatgtagaaatatgtaaagtccagaatgcaaaaggaaataaaagcaataaagctatgaaagtggcaacactgaagaagaattgtaactgatttagcaggcccacaaaagcactgagaacactgtgggaaaagtcaagaaggaggcagtttatactacaggaatcccaaaaaggcttgggaattttaggatcaaatagtagaacacagtgcctattcttggatattttatagacttctggaaaagacacacagagtcttcaaaaataatatcgcagattataagattgacatacaactaggacatagaggagggtcactgaacctgtgaagttttgaggagagtttacagaaaagacgacacctgaagtgagtcttggaggataaataaaagacatgatgtagccaggcgcagtgtctcatgcctgtaatcccagcactttgggaggccaaggcaggtggatcacttgagggtcaggagttcgagaccagcctggccaagatggtgaaacccccatctctactaaaaatacaaaaattagccaggcgtggtggctcgtgcctgtattcttagctactcgggaggctggggcaggagaatcacttaagcctgggaggtggaggttgcagtgagcagagatcgtgtcactatactccagcctgggtgacaagagcaaaactctgtctcaaaacaaacaaacaaatgaagatatgaagatatgacgcaagacagaattagtattccaatgccaattggcatttggtattctactaattctgatttgagatgtagggatgaatatgaagtaaaaacaggaggaactggatcagaagctttttaagaagtggtcagacctccagttgtccaacccaactcttgaaatagtagataactgtctcttttctatcttagcaaaagactagagagtttcctctgggaaaagaaaaaaagaaatgtaatctggatgggacacactgcacagttgagggctgaacacaggttaattaaatattgagaagaacttttttccctccttggatcctgtaatcctggcaacctggtgtgagtctacctgatcaggactatcactgatcctttactttccctgtatatctgacacgtgcttactgactgcaagtctgtacatcattgtaagcagtacagatatgaagaaaacatagtgttgtgagaaataatttaacataattaatcataaaaaggggatttagagtttagattcctggtttatgatcccatctaagccatcggttggttgtgtgggtctggaaagttagctgtcctggcctcatttttatatttataaaatgaatgaaactaacagttacaagaatagttctctttagattgtgacagaaaatcatactaaaaccgacttgagaaaaaaaaagtatgtattgtttgtataactgagaagtccatagttactatgaatttggatgtggctgaatagaacagtatttggttacctttatctcctggcctggctgtggtatttttcctagataggatttgggggttatggagtcttacatccaatgcaaagatggactagcacaggaattctaaagggtttttaaaattttagttttaagtgaaaagagagtatgagatttttagatataaagacttagatttatagcttaattacctgaaacggtttggggaaaactaatccacagtcatcagttttgaaagaaatgtgctttaagacaaagcataattattgcctacctccaaagttttattaacctgccattgatctattaattattttcatgactactaacatgaaatgtgaggccctcctctgattaaaacaatgcactctcagtcctatataattcagggttcaaatccagtgggagagaaacaagcttctgcaaggttcccaagagtcaagtggattgaacaggttaggacatcctgaaacaatcacggaagccaaagaagcatcttcatagcctaagtctttacttacctcttaacatgcttactctatggaattcccaatgcactttttctctactctctcccttcttgttttcccaatctgagcatcctggcgtctggcacacaggcttaccttatctcttggtttgcctggtgccacagtttacaatatgaaaatgtgtaactatttgttgatgtccaccaccatcctaaaaccagctattctgtggcgttgcttatgcctgaaatcccatactcaacctggaataccaattctggtttccttcgtatctcttatttatcctccaagactcacttcaggtgttgccttctctgtgaactctcctcaaaacctcatagactcagtgctctttctctgtgcgctagttgtgtgtcaatcttataattcgccatgttatattgaggactctgtgtctgtcttttccagaaacctatgacatacccaaagacagggactcccagaatcgaatgcagttcttatcacaaaatatacatgtgatgtatattttgccatcatatgcatcttaatgtttcccatattatttcgaaagtatttatttcatgtcttttctgactttatattcttcacatctagcactggacctgattcactattagtactcaataaacgtttatgtaaatgaatgaatgaatgacatgctttcttttgagagctttttaaaaaaaacacaggtatgaaaagcatgtagctagggtattatctcaaaagaaaaaatacatttgaaatcattgtggaggaaaatttattgagtatgaaattctatagaagccatataatccaaaatattgctacctgcttttacttgcttaagaaattcaaggctttctagcttgtggtaattttaaaatattttgaccaagatattaatatgtttaaatagcaaagtataatactaggatatctgatggtaatttactttagaaattctgcttaaagtatctttggattgtgtctaaaacatcaaagaattcatctctgagtttagaaaatgtgttgagtgaaatgatagacttctaatatttgttgtatatgtaatttatataaatattttctgaaaaaatacaattatatgtatggacctttccatatttcttaagtttcttcttaagtttttttcatattcttcatttgtttttactccttgatactaattctgtaaaataatgaaaatttttagaaagctctgttgtacaaataaaaatataaaagctcaataaagttaacccaaatttcaataactaaattaagttggatttcaactcagcttgattcttatctgggccagagtttacaatttttgttcataaaggaccagacaataaatattttaggctttacgggccaagaggcaaaatcaagatattgtgtatctgtttacacaatgagagaaaacaaattgtccccaatttttctaactatttagaaatgtaaaagacattcttaaataacagtgtacaatttgggttttttccatggccatagtttgctgactcccatggtggtgaaacaaatccaaatcttaactgttagactcttaagtttaacattgattctctgtattagtttgctaagactttataacaaagtactacagattgggtggcttaagcaacagaaacatattgtccaggcacagtggctcatgcctataatcccagcactttgggagactgaggcgggtagatcacctgaggtcaggagttcgagaccagcctgaccaacatggtgaaaccccgtctctactaaaaatacaaaaattatctgggcatggcagtgggtgcctgtaatcccagctacctggagggctgaggcaggagaatcgcttgaacctgggaggcggaggttgcagtgagccaagatcacgcctttgcactcccagcctgggcaacaagagcaaaactctgcctcaaaaacaaaaaacagaaacatattgtctcacccttctggaggctagacattagaaatccatgctttggtaggcttgttttctcttgagggccacgagtgagggatcctgtctccttgtcttgtagttagcttctgtgtcttcacattgtcttccctgtgtgtgtctgtgtccaaatttctcctttcagtaagaacatccatcatgttagattaggtcccactccaatgagctctctttaacttgattacctctgtaaagaccctatctccaagtaaggtcatattctgaggttctagggttagggtttcaacaaccaaatttttggaaggtacacaattcaaccgataacattctcattctctttgctctacatcagacctaatttctatgaacccaagtaacaagtatgagagttgcatttcactctttccactcttttttttttttttttttttttttttttttttttttttgagacggagtctcgctctgtcgcccaggctggagtgcagtggcgggatctcggctcaccgcaagctccgcctcccgggttcacgccattctcctgcctcagcctcccaagtagctgggactacaggcgcccgccactacgcccggctaattttttgtatttttagtagagacggggtttcaccgttttagccgggatggtctcgatctcctgacctcgtgatccgcccacctcggcctcccaaagtgctgggattataggcgtgagccaccgcgcccggcctctttccactcttttaaatttaaagccatagcttctctctcaataacctcacagcacaataatagacaactagaactgcattgagacaattctccatggaaagatgactctctgagatttggtttcccctcccttcaaaacacccagaagataatgtggcatagtgaaatcatctgaatacttaaccactttagcaagagagaagtatttagaaaaatcaaattataaagacaaatattaattttgatcatatttctaacaaataatgttgctggtttttaaccacttgacttggtgattccttaaatagatcaaaaggcttatacacaaataacatcctcctatgtcctagcagcactcagaattgactccaaaataaaactgttatttgaaaaccccagctgtgagtatgccttggtgttagaaagtgtcacaccttttgtagctagaactgtcacagcatgaagaactgatgtgccattgagtcctacatcctgcgcaaggatgggctagcacaagaattctaaagatgtcttttttttatttttaaatgaaaagacagtgtgagatttttagatataaagactcagatttatagcttagctagctggaaatgccttggaaaaaaatagaatcataaattttgaaagaaatttgctttaaaacaaagcatgattatttcttatctctgaagttttattagcctgctattgatgcgttcattattttcatgactgataacatttttatcagcaaaaaggctgtattttttgatattttttatttggtatttgatatctgtttcacaatcccaaacctactttaaaaggacgattataaagattacataagatagcacaccataagtatattatacagtgtcagtcacaatcctttttcttctcttcatagaaaaaattattagcagacatcagaaatcagttaatttttgaaaactctcacttctttacaaataagacaataaacaggaggcttttttatttagagaatggctggataccccagtgccctggttttatatctggaatagaaccatctccaaagagaacactgtacaaatgattaggcctaccctctaagtggagtttctactgattctatgcatgataaataatggttactctcttgcctacgtaggacagtaaagaaagtgaaggtcacttgtacgtgtttaaataataatatgacagatatgtgttaagccttgtgttcataatcgaagatattgtatcctgcattgtgtaaatgaggccactgaagcatggagagttaatatattaaccacaaaaatgtattttgtctatattttaatatgttatgaacctgttgccctcttccccacccattttgttgacaataaaatcttaaattatagccatctagacattcttaaacctggcattttagacaaaaataatttggggacagggtatagtttacactgtttctaacttagaagttttatctcttgcatagtaggtactcatgtggtctgattgagacacaaagtataaaagtaccaagggccagtagaaagtggaaaatgaaagtatcatgtccccttagcaagagaacagaaagactaggtcaagcattctctcgttttccaaagatcattaaaaacccttttgtaatattaagtagtctatgtgatacacagagtgagccttaaattaacttttaaaagttttctatcttgaaatatacttttaaaataaattttcacctgcataaatgttctctttggattaaagacttaatcaccacaatttccagagatacttttcctacccttttgattccattgttgttgtaatgacagaaactcattaacacagtgggtatcagtattgattatgacttttagactttactttttcccattatagtttaatttctgtctaaaatagatcataattctcaatctgctgctgctttggagtttttctaagatattggaccatttactcatggtgagataatagtgttcaaattgacactggcagtcacgaggtaccctggactcttttctcctatttgatgctctgttttgtggaatagaatagtatgtgtagccttccatgcagaattaatcatgaaaatgaactgcatactgcaggtacaatcagcaccatctaattacctcaaacttgcttgtcttatgactttatttagctgagcacatgcatttgataataacaagtaggataattcaaaatcctgtcaaccacaggcaatttagttatcataagtgaagtccggtgtgttttagagatcgtatccatttgacaagctagcaggtatgaacaggaaaggcataagacaggaaatagagaagtcagaatttgatttattaattttttaggagaaaagcctatcaggctatgtaagtcttttgagtctttctttaatgtatatattaaatattcagttaggtctattgttataacacctctagcatcttatgaactatagcgtgataatacgttaagagagagagaggttgattattttgactaccaggaatgttcttttcttgaaagaatctctgttggtcagagtcaacaggcactcttatgccttttatgattctccatgtgcaggtacaactaatgaacctggtagttcagtaccgtaaagctcatggagagcccggtgaaggctgagtatagatgaaggtcttggtgctcagcatggcttgagggccctggattgcaaccctttatagcacgtgaatgtcaagagatgagtcggggaggtgtgctgtgctgtggatgctcctccgagcttgagtcagctgtccatcttgctggcagtctcttgcaggctgtcaccatttcctctcactttctttcttgctgctttttctcctaaaattctgacctggatctatttacccatgtaaataggcaggggcaaatctggaagtgggagagaggctcatctgaggtgttatgctgttctttctctgtggaaacgaagtttctcccttttcaaagttaagggcctaaggctttggttatcttccctggagttaaggctcctcagtgctgagccttccacactcaagtgcccctttccccgggcagctcacactgtgtatttctgaatctacccacaccacaaagataaactttcaatatgaatgctaaacattcccaaaacaagacttttaagtagatcttttcctggatgttctttcattgatctcattccctggctaatatggtttagctgtctccccacccaaatctcatcttgtagttcccataattcccacctgtcgtgggatggacccagtgggagataattgaatcatggggacagggctttcccatgctgttcttctgctagtgaataagtctcatgagatctgatggttttataaaggggagttcccctacaaaagccctcttgcgtgccaccatgtaagatgtggctttgctcctccttgctttcttccatgattgtgaggcctccccagccatgtggaactgtgagtcaattaaacttctttcctttataaattacccagtctcaggtatgtctttatgagcagcatgagaacagactaatacatggcttaagggcacgtattaatacacaggcatatgcattatattttcaaatataaatattggctgatgaattattttgtgttattttgtcaatttatcacccgttttgaaaatatctgtgcacatatttttagaaaatcttgttgtttcagatcaattaaaaattgatttttctcggaagttttcccttgaaggtagtcagtgttgaatattttggtatttggttttaagcacgctgtgtatgatttctgttagtctattgttaaacaaaatcactgtgtgatatagccccccccaccattagcatttcaatagaacatacttaattgaaaaggtatgttttgacatatatcacctttttaggagaaaagattatccctgatacccataaccctacaaacttataaccctccaaattctctacttttaaaccatgtttttaatttcttcccaatagctgaaacccttttactatgctgcttagaattcataatccactgttggctgaattgcctctattagtaatttcttcttgaaacatgcccttccctttgttcttttcactgaaacctgcctctcccctgaagactccctgtagtccttgtacacattcttttcctcctgggcctgggggtgggttaaatgtctactttcatcatcacctctcctctgaaagaaatacctatgttgaagcctgtcttagtctatttcctatgacttataacaaaatatttgaaactgaataatttataaggaaaagaaattcacatcttagagttatgaaggctgagaagttcaaggttgagcactacatctgttaagagccttcttgctagtggggatgctctgtagagtcccaaggcagtgcagggcatcacatggtgaggggcagctgagagagagccaaactggcttttataacagacctactcacacactaacccactagtccattaacccactaatctatgagtaggttgatacattcatgagggctcagccctcatgacccggtgatctcataaaggtctcacttgtcaatacagctgcattgggggttaaattttaatgtgaatttggagggagcaaacattcaagccataacaaagttcctaccatcaatatagaccacctgctatccctcctagttatcatttcaagaaacttatgttactgtccctgagttattcaagattttaactctaatatttttgactttctaacactactgttattttaatttactgtgatatccacatccactgacccatagcctcacttctcagaagcttgacaccttatcctttaatgatcttgccttccattctacttgtacttcagtcacacactcccactgtcacaccctggaacttgtccttagtgaaaacttcaccttctccattcaaacagggttgagtatcatgctaacaactacccctatttttccagttcgcttcctttcttattctggctccaagaataatataatctgaccagtgcctgcaattcattgatacttaactcgtcagaatcctaaatacttgctgagttgtcatatatttctttgtacaagttaggttccatgatctattcaaaataaccagccaaacaaaaaaccttacttggatattttttctactccactgcccctttctcttttgcttatttgactagaaaaatctcaacttcagttaaaaccaacattttatctactctgctcctgtccagctgaatgtgattggataaaactataaatatcatgcagactgatttcatagtatgttcatgactagtaatctcaagtggactagtggtgtgcacagaaatcctacatttccctgctccactctttcattctcttaacaaataattcacaactattctttctcctcaaatttccagtctttctttccctttctcagttagcatgtttacagcttccctgagaaaatggaagaaatccaaatatcagtctcatcatcccagctacctccctactgatggtttacatttatatcagccttacctcctgttactgtgtatgaactgtctcagttaaatatccaaggctaaaccctccagttaggcactggatcccattccctctctgtgatcaaagtcatagctctagttatttctaaactgtcctgtatcaccaatttttttttgtctttactatatcattcccatcagcacaccaacattttgaagtttctctttcactataaacaaagtagacaaaataaaccccaaacacccctccattccatattgcccttgagccaccactctctctctctctttctctctctctctgctctcctttgcaataaatcccttgaaatattttttaaagttaccttgctatcatcaatttctctctgttgtctgttgaatccactccattcagtgttttaccccatcactcttctaaaactgtttttactaaactaatcaatgactttcttattaaggttagcaatggctttcattgatataaaatcgatgttgctaaattcattgtttaattttcgtgtctctcctgacttggcctatcagcactctttgatatgattgattacttagtcttctgtgagatcttttttttcctcttgtaaaattatttatgatgtttgaatagaagagtaaaatgataaaatttcacttcaagaagagtcatcttgataaaataaaaaaagagaaaaagacatataaaaagcattgccatcatcaaagggatgggtaataatcaacataattagattgtgttcctataaaaataaagtatagaagatatattttaaatatacaactaatgcaaattgcagctgatttgatattaaagtgagagtaaacaaaacctgtatttgcaataacaagtaaccctctaatgtcagtggcttacagtaacaaacatttattccttattcacaatacatggcacagctgtgaattacctgctgtggcttgactttacttgttttcttattactagactcagactgaagaagcaacccctgtttgggatgtcttttcttgagacagaggggaagagcaaaagaggcagcagaaacttacacagacccttaaaggttctggcatattccatgtatgttcatattccattggccaaaacacatcacatgcccaaggccaaaagtcaatgagatagataatgtataatccacaaaaagggaaagtagatggaatatttgtaaataatcatacaacttactatagtggcaattcacactagtttctttccttctaaagtgattgtgaaaatgatgagcagaaatagaagatgtagtagaagggatggatttgggaagggagaagatgaattcagtaagaaacatattgcgtgtgggctgaacattcaggaggagatgtcaggcaggcagtttgaaatggaaaactggcacttaggaaaaaggacaggctaaaaattttgagtacagccaagaacagattatttgggaacacagcattttggcaaaggaggatgaggagatataactacaagacagagagtagctggttagcaaactcaaatgttgagtaaaatgcatcttgataataatgccaattgatgatctacaactaagtcatccagactcattcagcagtgggttttgagttctgtaaatttgtcagagacaatgtgtcatagaaattaaaagtacaagctcaggaatgcaaacgctgggtttcccttcctgctcagccattttgtaaatcttagccaagattgggtaagttacttcacttctccaagcttgtatccttttctacaaaataattaacactggcgtttacccgtgcaggattgttgagaggattaaattagattatgcctataaaatgttcagatagttcctggttcattttaagcaattaattggtataagtagtattactaccaaaattgcataaaagaaaacactaaatctgcctttgtttacatttgttttaataggagtctcttcttcaagtatatgttttctatttactagttttgaaaattttattgacaacttaataagaaagtctgggatatgtattgttaggcaattatgtgaaaaatgcaaataatattaatttcaattataaaacatatgcagcattttaagtaataacatgtttattttttgattcattatgccaaaatgctcaggtcttgttccttgcaagagtatggctacacagtacacatacttattgctaccaatatttttatcacagtgaatttatgagagtcttgttggacaatgtggatactatttacctgcaacctcttaaatttgtatgcctaatgagaagtcttatggtaataaacattatttaagggaattaatcattgctgagggatcttttcactttgccaaccttggaagttggctagaattaaagacttggaaagatatagctattctactgctgacatttctgcagcaccccctgtggtacagattcactttgcattttattctttcctctatgatcacttctttcaatcattacatgtcctcatctatgtgttgggatcccagtggtttcactgggtttctttcatagtagtaaaaaataatctttcatgaagaagacaccctatatgacaccaacactttttcctatttttgaattaactgcctatgaagtctttaaaactgtcaatgaaacaataggttttctacagcctgtagcccatattgctcttttatgttatttttgtggttttcctgtcaaatagtttttggtgtttattttctttaagcatcactaggcatttgttaggctgcagagctgattaaaatccagacttccatatgagatttacagatgttgtagaattagagaaaattagcttcaggtctggcagtgattttctaaaagtggttccattgatctcactgaaatcaaggatttctttgctgagctgccaagatacataaatcttctatgagaactgattttgtaacagaccttgacatgtataatctaattctagaaaacaaacttctagctgaaaatcaacagcctaaaggaagattaaagattatgttggtatccacatgaatattttgtcctgtatagcacagaggagtagggaaaatcactggacacattcagaaggaaccccaaagcatctagatgttaccaaagtaaccaccctggaaattgcaatctacagcaagaaatgagtatttcagagatgaggtcgtaacctgagtgggatttaatgcttggttttatgtcatttgacttaaaaaaatatgacagcaatgttagtgtgttataatctagcaatggtcaaggagacaattataaaatgtaagctctaaccttcttgtctttctctagaaatagtggttcatgaaatgcaagttgtgaagtgaattttcttcttttgaaattttttctatacatattccttcagtgttttagaaataacatggccagctaattatttttatggttctatgtatactttagatttaattaggggtctatttatttgtcccagtttcacagataaattataataatagcaaattatagcagattaatttgaatattcacttatagatcaacataattaatatgaactattatgtttattgcaaaaggagtatcagagaacagtatcacagaaagcttttgctaaattaaaaacaacacacctctcttccaagcataattaatgctaccattttcttttcctttctagtgtttcttcatatatatatatatatgatatacatgatatatctcatatatattatgaatgacctcatataacttatgagggtcattcaattttatatacttcttatccacttaacataatggtttttataatttttgtgagcaagactttattgttttaagtatacaattaacataatatataaaatacattaaaatcaattagttgattgttctgaaatgcatgtgaagaaaaataagtgtataaatgacatagacaaatataacaggttaaaatataaaattcattcaattattgtcttttccttccaaatatgtttccaacaaagaattagacactattattatagaatgtgtgaatagattatcactgcaaacaatgttatctcaactgagtggacaagagggaagacccagtgatcacattggtcttgcaatttttcctttcactttcaccttcccttagtttgttgacatgcgctattgtaaaaaatcacagatgctgctaatagtgtcctcattctaaaggaaaaataaaaaaatcttcattctacttgtttcttctctctttgtcctcttaagagagatcaggaaataactaaataagcaaacctctaatccggaactctatataaatcctactgttcttgtgaccacagcagctctctaagtcttgcctatcttaggcagcaaatacatacttttacaggggtcctcagagaatttgaagatgggctgcttacccagaatccgagagtatgagctggaaaatcactgtgtgtcccacatcactgtataatgggaccaaaaatagacatgtcatactagcaaagacaggatccaagaaaacactgacacatgtaaacatttactgaaaccccaaacatcttctcttatcagcatttggattagtaattttagctttggacctttcactaggaactacacagtttattgctaatagttgctcattgatctcttagcatttgggattatgaagggattctattctccacatgtgaaatcaacataataggaatgtttgtgccttgcactgtctttgcaaatatcgcaggtcaggtaatttatatttgttatttagtcaatcactttaccatttttttccataccaccattcccttccccttttcccaaaaaaaagtcaatttatggaattcaaccaatttgtaagttcagatttcttttttctgaggttttaattcaagtagagaaaataagtgaatgcaggtggaagaaacaaggaaaaaatacatgataaaccataaagtaatgttagaattattatgaaagcattcagatgaccattttaacatattttttaaagccactattttagcatattaagagaaccacagcactttgctttgtttaaacaggcatactggtatttctgatttatcaaaaactaatctataaagcccctaaatacttaggcttatcaaaaatatactgtatttaactttgtagaggtttcttttctttatttttaagatgaaataaaccagttatttttattagtttggatgctgatttttagatttactattatgagtgatttttgtaatgtttattcagtttgaatgtatcagttggttacaggatcaagaatggaaattagaactcaaggtatgatgagatactagttgattcccctctgcctcctcaccatgtgtaagttgatacttgtgatagccagtatacatccatcctgttgacagtacttcctttgacactgcgtctaactcataaagaataatttgtcatcccaaaggatccaatgtatctatccaacttcatcttccattcctctttaacttaaaccttgatctccagatgggctaatatcctaaatctctaagcttttgctctcccttcagaatctactcagaattacgtacctctcaaatttggatttaagctctttctcttctactctggactgcctgacatttatatgatcttgtttgcatattttattaatttacctctattgccttgttgcaaaattagaatcattatctaagtttatctatgtctcttatctccagtatgccctgcatcaagcaattgctactatactttgtgtatggcttcctccccctgcccaaatacatacatatatatatgtgtaaatatatatgtgtgtatatatatatatatggttgaattatacatatataaagttgaattatatatatatatcaaattttatatatatataataaagttgaattaaattgaaagtgttcctatacacatgtttctttgattttagtactacaaatgattgtggatgatataatactaagcaataaaaaattcaaacatgttaagcagtttatccaaattctaatttaaacttgtttgaatttaaaaccttttctactaacattaaccatattgcctgaagatgcctgatgtcaccacagaaactttgtcttaaatgattccaagttcttagattaatgtaaagtatatgatgagctttttggaatattttctcaatgatcttggtgccatcaattctaaatagaaccttattgccagtattgtgtacctcattacagagtaaccctgggcacttcctttgtaggttctggttgtaattgacaccatatatattttttaaaaatattttaagtttttcaggaacaaaaactgttacggttgacacatcacaccactgtctttatgacctatctttaaagtgatacaaagagctactacaatagttgctttcatatttctaaaattcattgacttcaaagataaaagtcaaaaagatgtgaaaattccgtaacagtcttttcatgggatctattttttcactttcaaactcttaacagtaaaagtgaaagatgaatggtgttttgcaaggtgtcagaagtacttctgtgctgtgctgtattctgtgtgtgtgtgtgtgtgtgtgtgtgtgtgtgtgtgtgtgtgtgtgaatatgtccaaacagatataatttttagctttttactcaattataatactgggaaatgacataatataattccaaagtatgtagtttacgtttaaaaatgcatttttgaaatagacctgattgctaacctagctaactaatgcagactctacttataatgtgcgactaagggttcaagatcatagaaataatatctgtaatttctattgatgttttgggattgaaaagctcagtcgaatataacaatagtagtaactttacttttgtccttaatgttgacttcagaatagaattatgttggattccttgaaggtgcattattagccctatcttgctaaaaggcataactctttgattaatgttgataattttaatttgtagagcattaaaagttcaggaattgattctatgagaaatattcactactccggatgctcaattgaccaataatttaattcaaaacaaatgttaactgaaaacagtgtattaatcagagtccataaaattcacctgtggccgggcgcagtggctcacgcctgtaatcccagcactttgggaggccgaggcgggcggatcacgaggtcaggagatcgagaccatcccggctaaaacggtgaaaccccgtctctactaaaaatacaaaaaattagccgggcgtagtggcgggcgcctgtagtcccagctacttgggaggctgaggcaggagaatggcgtgaacccgggaggcggagcttgcagtgagccgagatcccgccactgcactccagcctgggcgacagagcgagactccgtctcaaaaaaaaaaaaaaaaaattcacctgttaattggctacatttcttgtgcaatttctccttttcttattttcatttttaaacaaagacagaatatacagaatcactatcctgcatagtacattcccaataaagcactcactcactctaaattaaagagttgtcataatggaaagaacgaaaatggtaatttaattttgctaatatttcttaccccagaattcattcattattcattcaccaaacatccacacctacggtattagcactgaggacacagtcgtgcacaagataaaccaggacacagatttcatataacctagaattttgcaaaatttcttgaatccttggaaagttgacattcaaattcagggttactttaacattgcaaacaggtatctgtggaaattgggggaaatgcgtgcgaagaaaaataaatctatgaatgacatattaaaaacaaagtataacaggtttaaatacaaactcattcaattactgtcttttcttatcaaacagaaaggacgttggaggggtgggaagaggcctgactcaggtaaaataatttgttgatattgagggagggccatagtgtataaaataatagatctttaaacatttgctcacacttagaatggtaatatttttctaataccagaaagaaactcatttcaccctttgaaagcgttagttattttcttttttttttttttttttttttttttgagatggagtctcgctctgtcgcccaggctgtagtgcagtggtgcgatcttggttcactgcaatctccgcctcccgggttcacgccattttcctggctcagcctcccgagtagctgggactacaggcgcctgccaccatgcccggctaattttttgtgtttttagtagagactggggtttcactgtgttagccaggatggtctcgatctcctgaccttgtgatctgccagccttggcctcccaaagtgctgggattacaggcgtgagccaccgcgcccggccgtgttaattattttctaaagtgtttcatccatattcgcttgggtcttcagtcaaattttaaggctatcttaggttaggaaatatagactttgtttctccctgctgcagagcacagaacaatgtatgtaacttggctttcatatgttaggtattagctggttggttgtttaaatcctctggggaaacacgccaaaccatgtctacttcttgcaataattttcatttggtcaaatcctggtgtacagattttgctctgttcatctttataagacctgtatgcacctagcaaattcctgaagtatgaatgaataaaagaagaatgagttaacaatatacaatgaatatgaatcattaacattttcaagtttctgtgacaaaatttgtgacagtctttactgtaagcaagcaaattcaggtgtaggttttacataatgcacttttatttatttgttataaatgggctaaaattaagaatctcagttacagataattactcatctatctttttctacatttcatatgttcactaaggacaaaagctaatttttacttacctttctgtaatcagcaattagtacagagccagaaatatagcaggtactaaataaatcaattatggagtacaagaacagagggaacattttgatctctggttaggaaatccaaagtgcccttcaatctcatagggcatgacgttgtaatggaagcaagtccagatattgtttttggaaataaaacacataacactatggtgtaaagatttgtacagcagtggaaaagctatagggaatagagactataaaccctctgttttagtttgccaagacaaagacactctgggggaaaaaaaaagtacagtattaagtagaaaatctaactattagaaaaaaataaaaatgaattatacaaacttatttaccaagtaaaattgtttcttaccccaaatcatctttaattttaaatttagaaaatatattaatcccaaaggactgttgtttacagagacaagacttaaaaataataattttatttacttttttttcttttttagagatagggcctcactttgtcacccaagctggaatactagagtacagtggtacaatcatagttcagtgcagcctcaaacacttgggctcaaacacttgggctcaaacagtcttctccagcatctggtactataggcacacaccatcacatctgactaaatttttaatttttttagagatgaagtctcgccatgtggcccaggctggtctcaaacttctggcctcaagcaatcgtcccactttagcttcccaaagtgctgggattacaggcatgcaccaccatgtctgacctattttgctttttaaggagaatttctaacatatcaattttgaatacaatccaaggattagatgtttatgctatatgtctattgatttaagagtttaactgaaagcactgtaacaaaaatggcttgtgaaatcttgagccagttgaaatcagcttgtcttttataccaaaagacacctagaaaatatttatttcaaatgcctgagatttaacctatggccaggttgttaaacagtggactgtttatttttaactgaaacaagtcaatggatataatggtgtaacattttaatgagaggaaagtaatttcccaagccaaaaaattgtactttgtaaaatgcaagaaattactaagatgattgcaaattgtgtaaactttgaagatgctaagactgtcatgtcaaccaagaatatcctaaagcatttaacctaattatgactttgtaaatatacaattataaatatgtactattttatttacttcagttattctttaaaatactaaggaatatgatgaacattgaggaaacggtgaagatatttttaattaccgggttataaatccaaaacaaataatatctaacattagttccttgtacatcaaaaatattaaaaatatttcttggcttggccaggcatggtggctcatgcctgtaatcccagcaatttgggtggcctaggcaggtggatcacgaggtcaggagattgagaccatcctggccaacatggtgaaaccccgtctctactaaaaatacaaaaattagctaggtgtggtggcacgtgcctgtagtcccagctacttgggaggctgaggcaggagaatcgcttgaacccaggaggcgagggttgcagtgagccgagatcatgccagtgcactccagcccggtgacagagactccatatcaaattatatatatatatatatatacacacacacacacacacacacacatatatatatacacatatatatatacacatacatatgtatatacatacgtatgtatatgtgacttgatagcatatttgttatgtttcatgtaatgcatttactttgtcagtatactaccacagcacagtgaataaaacctctgtaccagaatgtcttacaatttatgtaggcaccataatgagataactaatttctgaaattgacttctataaatgtcctcaatcaattcaaactcaactcttgaagagagagcaagagagagaaaaagagaaagaatatgaatataaacacaattaaagtgcaaacatatttgtacatgtttaacaagaaagagaacacttgaagaagtacagagtggctcaatgtgactattcgtaggtaaacaatgggaaacgaggctaaaccttaggcaaagatcagactttgaagagtgtttgtaccatgctaaagtttacagaatttattcctgctctttgagggtgcattgcaaatccaggctagagggagagataccagttaggagagtacagcaatactctactgggaaatggtgaggtgtttcgtgaagacaatggcaacacagatgaagacatgcagatggaggaaataaagatccagttgagcttgttggccagttggatagaggttgaggttatgcatgatggagcaatctaggtttttgtcttgggtaggtgtttccatgatagtactcagaatgaatcatatagttgtacaggttgaatcccacccatgtttgcacaatagagtgactgtctagctgaaatccagatgacactctgtatgctaagctatgcttcatggaactgtataaaggcacttgctacataggctagtggcagatctggaagtaacctatatggtatataggaaatgaggtggcttttgtataaatcctacagataaatttcatttcctgatcctattattttgactcatgttagcccaagaagagtattcagtacttcatatccctgaaggtaagacagagtagtattagattcactatttggcaaataaaagggatcaagtcctaagatcaagctgatgaatcaacacctcataggatatgtcccaaccaattatatggcttcccctataaataaaatctagttctcttctctggagaggaacagtgaagaatatcataacctatgctacaaactgcttgagtaggagctacttctctccaaggctttatatcattcattctggcaggcccctctgtttgttctcaccagctcctgggaaatttatttctcctctagtgatataaaagctctctgtttgagatgaagggctgcccagtttatcagatctgtattagtctgttctcaggctgctaataaagacatacctgagactgagtaatttatgaaggaaagaggtttaattgactcacagttccacatggctggggaggcctcacaatcatggcgaaagactaataaggagcaaagtcacatcttacatggctgcagacaagagagcatgtgcaggggaactgctctccataaaaccatcagatcttgtgagacttgttcactattacaagaacaacagacaggaaaacccgccccctcaattcaattacctgccactgggaccctcccacaacacatggggattatgagagctacaattcaagatgagatttgggtggggataccgccaaaccatatgaagttctttctttgttactgggtaccatatccattctgttgaggttctgagcctttccagttactgtaactcctctatctcctgtctgtgctaagactcagtgacctctctctgccttgcttctgctttgtcctgaccctttctgtgcatgcactcactctagtttgcccacctgaggtgagagatggtccagattagcaacaacaatctgtggactaaaatcctctttagggaggaagcaaaattcagatggatgttactaaacaaagctcagaaacagagaccagggtgtgggaagtaaggtagtagcctgagagcagctggcagtgttttagacctggagggaggttaggtcatcagcaatgaggagactgcctggaaaatcctagaaaattaagacatctggtcaggcaaggtcatatcaccagcacacttcccttttcaagttgaatccctttcctctgttaagaggattcaagtgtctttcttgcattttgtcttctcttctatatccatgcttgcaatataaggagacagcagttggctgtttgtgctagaaaatataaatggccattttgaaagcatgccagacaggatctgcggcaagttttcaatgttactgctgccatctgttgttcttcagtgctgggatgtgaatctcttggcaaacatctctctaattctgaactatctttcacccccatctagagatattcacttactgaagtgcctttttaaagcaatgttcctcaccaaggcgatgttctgaatgttttaaaatggaagaatctggaatgtttttattataatacattttgtatatcccaaagcaaaaatcaatttcttcatggttaatacttttgtaattttgtttttaataatattttccttttaaatataagaaatattttattgaattaatactttaatgtagctgtttcaagtaagataaaacagaacagattactgttttcaaccttgttcacagttagctctgtaactaagttgttgagctttatctaagcttttttatttttacataacgtttcccttttcacttaaccttgaaattatagtaatttgggaacttctattcctctgaaagagaaagctaatgccaaagatatttcaagggagaaagaaggtttttaaaaggagagacaatttagctcagacttaatagctgtgattgctatttattaagcagaacgcctataactaaattctcagatatccaaaaaacagcctgtacattctcaaaagtgaagattacacattttctaagttaaggtaaaagttttgtctctgtagcatcttactgatttctatcttctcattctgccttaataatgtcactaaataaatgtttgatgcactaatacatgaataaaactattcatggtaatgattctttagaaacacagctaagttttgtaattttgttttttaaaaattaaaaatttaaatataaaaatgtttttaaaaggcttgaatttcttgttaaatgtacacattttaagttgtaggctgtctttaaaaataatctctccacacactgtagtatttaaaacatcatgatattactataaaacatcaacaaatagggcagtggaaaacatggtaatcactaaaaatgctcacatgtcatatattaagacttgataagtaaaccacaataataaatagaaaagaaatagttgtctaaaaagggattctcacctttcaaaccttaccataaaaatggaatataaaagaaggaagaggaggagaaatcaaattatatcataaaattttctgggcaaaaatattacagaagaaaataagaaagatttatggagttgactgaaacatttttgaatcctatacataaaaatatcgttaattaaaaggaaaaacaaagaaacagatttgggaaatatttgaaactggtttttttttagcatttaaaaatgtaatacaaatggattatttaaactccattgcaaaaatacacaaaggacattgacaatgtctggaaataaaattagctaagtaagttatagaaaaactcagtctcacaatttgacaaatgtaactgaaaactattaatataattagtaactatttttacatgtcaaaatttttgaattactaaaggaaaccacaatgcctgaaagtatccagggttttttttttttttataatattggcactgtcatatgggtggcaggaattgaagtgatgttgtttcttcagttattaagttgcatctgcagtgtttcaaatgtccaaaacctgtgagtcagtaattctctttttgtatatttatcctaatacaataattctaaacataatctcaatatatatgtacaaagttattcactgcagtgttacttacaatagttagaaaattgtaaaatgctttatgcatcttaaaatataaattgttgaatatataatagtccatatgatataattatatcattattataaataatgaattagaaaataatttaagagcattaaaataattataaggtaatatgaagtgaatgaataatgtacagatactataatcagcagagtgttaactaggtaaatttttatgtgtgtatatactacttcctaaaaatgacttgacagaaatcatcaaaatgctaatggtggttacttctgggtgggaatacagatgatttactttgttccttttatgtatttctgcactgcccagtcttccacagtgagcatatattggtttttaaatttatataagatggaaaaagataccaaatggtcttcaatgaatcctggagttaactttcatgtgtgtcatatgttatattctaaacttatcacaaatagaagactttaaatcaacttgtacctatttcaactatataacagcatctttaaaatgagcattgaattaaactaccaaaaccaaccatcatgaggattattcaagtaatgtgtttaaacaaaagaatttgtaataaaattactttatctcctttgtgatttcagcccatttaaaaaaaatagatgtttctactctccttcagatatcattaaaacataaacttgtgcctgactgcataaatcccttttaaactaatatcacttattacgtttaactaagtctacctagggcttccttgtataaagaacaagagctttccattttttgtttacctagccctttctgatgccacgacagaatagctgtaaatcttcattatttatattctagagaaaataaaagcaaataaaaaggtcagtgtataaagtttattggttgttctctttactcaaaacccacatggtattaatgttagtctctatgaatatttcatggataaaatcagagcattaagtgcatactaaaaacaataagaatggaaagactttaaccttatgtttatatgaatttctaggttatcaagaagtttataggctataggctataaagtcttaggctatgatatagtaacctaatgtagacttcccttgatacatgaaaataatggtactaagtacaaacagaagatgagcttaaaattattctttgagtcctcttgatggattttttcccccacactttccccaaaattgttttatgcctatattgtaggagaccatgcaagagacctagagtctctttttctttcatcactttccaatcaacagcaaatcctatcatttttaccacaaaatatatcttgaaactcccttcttttgatttacttgtaactccccatcaaaaactgaagagtgtcacaatacttcattaagttccctacttgcactctacctttaatatatttgtagcactaaaatgtttttaaaacatatatctgcttatgtcattttactgctcaatactatctgattttctattgcacttctaagatactctaatttcttagcactctatataaaatcctttaagggcttccctgctcaccttttcagactcagaactatgtatttccttttgcctgctgtacttgtaccactggattcttgatttttgttacttccaggtttttacacttatttttacaataaatgtgaaataccctttttgacaatatctacaaatatttcttatttgtctttattgctctttcctgtaatgtttagtcttcattttcctgataatggctatctaaagttatctcctcaaagaagcagttatttattcacccaaatcttctagtccttctctggagttttcttctcacttcattcccttggtttttgccacaatttgtaataatttgcaatttggagtgttagaatgagggaataaatcacaggtaatgactatagtttgtgactatgtaagattggattcgttattgatttattccacaaacactgaggcactgcatttagccaaatgccaatcttgggcagtgagactctgaaagagaatctgcttcccccaccataaactacaaagtgaaacaactcagaatgtacataaattacagaatgaaagcacactagaagtaaacacagatgtggaagaggtaaagtgtccttgaaaatcatggaaagattcataaagggaatgacatttcaactggattctaaaccagttattcaagctccacaaggttgcacagtaaatgagcagtggcaggatgacataccttagaaagtaaaaggaatcttttttaaactgctataaaaatcattacatatacattttgtaggtcgagagtaaggtatttaacataaaatcattttagtatatcagtgtttatatagacttaggtttttctcatttaaaacctcttttaatgacttgtgcttttcttcatggtaataaaacattttcccaggaagtgctgaataaatctttcttgaaatacgttttattgctttctatcaatgaccctgaagtaatacagaatttacacttcagcggttgcaatgctcaaacttgacaggtaatgcactgtgtttgctgatataagaggtatgatgtagggctaagtggttttgtgctcatttagctttcaggagaaaataattgacttaacattttgatactaaaacccaaagcctaacagttaattcttggtattttaaattattattgcaaagattattgtgccgaataatatgaaaatattttatataatatttaaaaagtatatctctttcttggtattatttaaattaccataaaaatgtgcgaaaaagttatactgaaatgtgataggatcttttaaaagtggtgccttgattttgttaagtgttacctagttttcctctgaaaacaagaaacatacccagaagttttcacgaaatggtctcatgaatatctaaggttagtccatagtctcatctgagacaaggaaagtcccttccactatgagcctgtaaaatcacaagcaagctagttacttcctagatacaatgggagtactggtattgggtaaacacagctgtttcaaatgggagaaattggccaaaattaatgggttacagggcatgcaattccgaaatccatctgggcagtcaaattgtaaaactccaaaatgatctcttttgactccatgtctcacatccaggacatgctgatgcaagagataggttcccataatctttggcagctctgcccctgtggctttgcagggtatagcacccctcccagctgctttcacaggctggcattgagtgtctgtggctttcccaggaacaaggtgcaagctgttggtggatctaccattctggggtttggaggatgatggccctcttctcatagctccactaggccgtgctccagtagagactctgtgggggctctgaccccagatttccctcctgcactgccctagcagagattcttcatgagggccgtgcccctgcagaaaactctttcctgggcatccaggcatttccatacatctgaaatctaggtggaggttcccaaacctcgattcttaatttctgtgcacctgcaggctctctaccacgtggaagctgccaaggtttggggcttgcaccctctgaaaccacaggctgagctataccttggccccttttagcaatggctggagtgactgggacacagggcaccaagtctctaggctgcacacagtatgggcaccctgggcccagccctcaaaatcattttttcctcctaggcttctggatcagtgaagggtggggctgccatgaagacctatgacatgccctggagacattttccccattgtcttggggattaacactggctccttgttacttatgcagatttctgcagccagctgaatttctcctcaaaaaatgggtttttcttttctactgcattgtcaggctgcaaattttctgaacttttatgctgtttcccttttaaaatgcgatgctctaacaacacccgtcacctcttgaatgctttgctgcttagaaatttcttctgtcagataccctaaatcatctctctcaagttcagagttccacaaatctctagggcaggggcaaaatgccaccagtctctttgctaaaacataacaagagtcgcctttgctccagttctcagcaagttcctcatctccatccgagacaacctcagcctggtccttattgtttatatcactataaaaatttttgtcaaagccattcaacaagtctctactccaaactttcccacattttcctgtcttcttctgagccctccaaattgttccagcctctgcctgatacacagtcccaaagttacttccacatttttggatatcttttcagcaatgccccgctctactggtaccaacttactttgttagtccgttttcacactgttgataaagacatacccaagactggaaagaaaaaaaggtttaattggacttacagttccacatggctagggaggcttcacaatcatggcaggaggcaaaaggcatttcttacatgatggcagcaagagaaaatgaggaagatgcaaacgcagaaatccctgataaaaccatcggaccttgtaagacttattcactaccactaggacagtatgggtgataccacccccatgattcaaatgatctccaaccaggtgcctcccacaacacatgggaattatgggaatacaattcaagatgagatttgggtagggacacagagccaaactatatcacatggatttcttatacttttgcttttaataacacaaacaaaaaaatacatcattaaaaggttagaagtgagaaggtgtttttatggaaatcaaaaataatatcaccttagtgaacagtattcttatgattgtagttgaattagagagcagaatacatctagaagattcagtagtaagcatgtttcttcgattaatggaaaatttgaatagcctagctgattgagattgaggttactattaaatgcctgaagtataagagttggttgtttatgtaaacaaaatatctgttttacatgtacatgtgtaagtaggactgttgagccccagtaacatgaaatatcaaagagcatgactcgaatacctgccatatgaagtgctattacatcaaaaaagaggcgtgtgctgaaaaattacctacaaatggcattttcctcaaatcaattttaaatcttcagaatttcattttaataattgtttagttaatatttcagaatccctcatcataaaaagcaggcaaaaggcaaaagtccttgaatgtataacacatttgttttcaaacaagcctgcctctaactgtgaatccaggagtgaatccagaactacaaattaactaagattggccccatcgagttactgaacgttaaaaatctaaaaactaaaaggcatgcctcaacaattattttcttcttggaatcattaattaacctatgtgtatccaaacaataatcttccagcagtttcgctagctacatttttaattacttaatatcatgtaaaatttgttttattattgttcagttctgaattttgacatatgcatcaagccatgcaactgctaccacagtcttcctgatcactgatctgttctaaatctctatagcatttttccttttcttaaatgttgcataaataaaaccataccttatgtggccttttgaatctggcatctttaacttaatgcgcttgaaattaatctatgtcatttcatgtatcaatggctcaatctttttaattgttaagaaaaaatgtatgctgggataaatatctttctaaatgagtttttgttcacaatgctgagtgtttgtttaggatagattcctagaaatggtatcactaggtcaaacattcaaataattttaaaatatttgatacatattgccaaataatctcaaattttttaccaatatacatttatgacagtatgggataaatgtgtctttcttataccaactgacaacattaatgataatacataaaatattctttgctaatttgatgggacagaaatgttatatccttattagcattttattattgtggttgaatgactgtactgtacagccagagatatttggttcaaaatccatcttcattatttactgtatgtgaaaatttaggtgagctatttaatctcttgatgccttagtctcctaatctataaagtggggataattgtaccaatcatattaggttcctgtgagaattaactgaattactatagaaaatgcttagaatggtatctagtcaccaggaaggactctctctgtattacttgtttattatctaacacgtttaattattaatgaagctcagtttcgttatatgcttgggatatttgaaacttttcttagtgaattttccaataaaattatttgtctatttttctatggacaagttggtattattcttactggtttgtttcaggttcagttagtaagaattttaaggattttctatcacattttagcaaactttttctgcattttatcttttttctttcagataatgtttgcaaaatgtaaaaaaaacaaaaggtttcttcatcaagttggtatctttatcttttttattgctttgtgatttgaaaattcttgtcctgagaaccaaaatatatatttgatgaaatagttctcttcttttactcattctgaagtcattggaattgaatttggcatatgatataaatcctaattttatattttatgatattcaaaatttctaacaaatatttacttaataatctaatccaggtttctattgtttcttctgtttcctttataatgctttttctgaagttatttttcctagacttaaatattagtataatattatcatagaggaaaaaatatctgttagctatgaataaaaggctttcatcttattgttgcattaatatatttaaatgtagagagcatacagattagcaaagaaaaagtataattgcctttttttatagttgacatgaacatgtataaagaaaagccaaaaaaatcaataaaacaactagaacttattagtgaatttagcaagatcatagcatacaaagccaagattcaaaattccattttatttatctactaacaaaaactatttgaaatttgaaaatttaaatatgccatttacaataacatcaaaatattgaacaataaagtatttaggaatttataaaatgaaatctcctataccaggaattacagaccattgctgaaataaatgaaagaagaccaatatatgtgaagagatactcatttgtggattgagagacaatattgttaaagtatcagtatttcccaaattaatcaatagattcaatataatggtgaacagaacaccagaagatgttctgtcgaagctgacaagctatttctataattcaaatggaaatgcaaaaggcagtcactgccaacaccagcatggactgtctgggttccagtaggttacttcactactgcctcttctgtcagccacatcacgacagctgcccagaagccagagaaactcctcacacctggcccactgctgcagctaccagcatccaggcaagccaccatcagcccactggtaactgccaacagaggtaccactgtacactaccctggggaacaaagataggcatgtagtcagcccacctctgccaccactagggcctgaagcctggcccacctgacactgcagtcctcagcacagcttcatcacagcttctgttaataaccacaccctaacctaccaaggaaatcacaaatgtcactgacactgtttgtagccaaagaaatcatagagagactacattactgcacacacccataatcaaagccacagtaccctatccaaacaacatcacaggtatatctaaaggaaaaaattttcccatatgaaagcgaattcaaatataggaagaagcgactgttacaacagatatgcagataaagcttcaacaatatcctacattcaaccagaagaaagaatctcagaaggtaaagacaggtcttctgaaataatctagtcagacaaaattaaaagagaataatcaaatccttcctgacatttgggataacattaaagtgaccaaatatacgaattatagatacccctgagagtgaaaagacaaagaaaagattagaaaacccacttaattaaataatatatgaaaacttcctaagtctagcaagagttttagatatttgggatgcaggaggctcaatggtccccaggccgataaaacgcaaaaaggtcttatacacagcacattacaatcagactgtttaaagtcaaagataaggaataaattctaaaaacagcaagagaaagtgtatgataacctatgaagtaaaccttatcagactgacagcaaatttctggcagaaactttacaggccagaaagaataggacaatatattcaaagtgcttaaagaaaaaaaaaactatcagccttaaatactatagcccacaaaattatccttcataaatgaaggagaaataaaaggtttcccagacacgaaaatgctgaggtagtttgttactactagactggacctacaataaatgctcaagggaggtctggaaactagtagtgaaaggacgacatttatcatcatgaaaatacatgaaagtataaaactccctggtaagcaactaaagggaggtatcaaatgttaccaccagagaaatctaactaaccacaatgacaaacaataagggaaaaagaaaggaacaaaaatatataagacaacgaataaacaacaatataacaggaagcctcacatatcagtaatcactttgaatgtaaatgaattacattctccacctaaacgttatgaaatgcctgaatgataaaactatatgatccaaatatatgctgattacaagaaacttaccaggcagacatacataggctgaaagtaaaagaatggtaaaagatattccttgcaaatggaaagcaatagtgagcaggagtagctatacttaaattagatcatacagactttaagtcaaaaagagtaaaataaaaaagacaaaggatgttattatataatgatgagattaacccagcaataggaaataacaactctaaatgtatatgcattcaacactagagaactcagatccacaaagcaaatattagacctaaagagagaaatagactgcaatacagtaatagtggagaacttcaacactccactttcagtattagacagataatctaggcaaaaaatcaaccagtaaattttagatttaaactagattttagaccaaatggacctaacagacatttacaaaacattccatccaaccactgcaaaatgaaatttgtgtcatcagcacatgaaacaatgtccaagatagaccaccatatgttaggccacaaatcatgtctcagcaattttttaaaagttgaaatcatatcacatatcttctcagaccactgttgaataatgctagaaatcaatgccaagaataacgttggaaactatacaaatacatgcagattaaacaacatgttcctggttgatcactgggacaataaggaaattaagctgaaaatcaaaaaattcttgtaacaaataaagattgaaacataacatatcaaaaccagtggcatacagcaaaagcagtgctaagagggaagtttatagcaataaatgcttacactgaaaaagtagaaatattttaaaattagcaacctaacaatgtgcctgaagaaactaaaaaatcaagaacaaatcaaacccaaaatcagcagaagaaacacaataataaagatcagaaaagaactaaatcaaatagagactaaaaaaatacaaatgattaacaaaactaaaatttggttattcaacaagataaataaaattgataaaccactagatagactaaacaaggaaaaagaatatccaaataaacacaatcaaaaacgataaaggagacattacaacagatgccacagaaataaaaaggatcatcagagactattattaacaactatatgctgaaaaatggaaaatatagagaaatagataaattcctagaaacttacaacctaccaagctgttgcatcaggaagaaatagaaaacctgaacatatcagtaatgattagcaaaattgaatcagtaataaaaaacatctcccaactcttttaaagctttggaccaaatagcatcacagcctaattctaccaatcatgcaaagaagaataccagtcttcttgatgctattacaataaatcagaggaaggaattctctctggctcattctacatgaccagtgtcaccttgaaaccaaaacctgacaaggacaccacaaaaagaaaactacaggccaataaccatgatgaacacagatgcaaaaatcattaacaaaatactggcaaacggaatccaacagcacatcaaaaaaataatataccacaatccagagggtttgtatcaaggatacaagtatgactcaatgtaaataaatcaataaacatgataagcatcttcacagaatataagacaaatgaatatatgatcatctcaatagatgcagaaaaaaatttttgataaatttcaacatctcttcatgaaaaaaaactctaaaactcagcatagaagaaacatacctcaatataataaaggccatatgtgacaaactcagagctaatatcatacagaatggggcaaagtttaaagactttcctctaagaactggaacaagacaaggatgcaaactctcaccactcctatccacatagtactagaagtcctagccaaaacaatcagacaagcaaaagaaataaaaagtatctaaattgggaagagcaagtaacattgttcctctttgctgatgatatggttttgtatctggaaaatactaaaaactccagcaaaaacctcttagatttgattaattaatttagtaaagtttcaggatacaaaataaaaatacaaaagtcagtagcatttctatgccccaataataaaatagctaagaaagaaatcaagaaagtgatcccatttaaattagctacaaaaaattaaaatacctgggaataaatcaaggaagttaaagatctctgcacaaaactacaaaacactgatgaaagaaattaaggattaaacaaacaaattgagaaacatcccatgtttatggatcaaaagaattaatatcattaaaatgaccatacttcccaaagcaatttccacattcaatgcaatttctaccaaattaccaatgtcatatttcatagaattagaataatcctaaaattagtatggaatgagaacagagcccaaatagccaaagcaattctgaacataaagaacaaatctggtcctgacttaatcactatgcaatctatgcatgtaacaaaattgaacatggattttatcaatttgtacaaataaaaaaatgtaaaaaaagaacaaagctggagactatagtagccaaaacagcatggtatttttagacaaatggtatggaatagaaagctcagaaataaagccatatatatatatatatagtgtgtgtgtgtgtatacacacatacatgtatatataatgtgtatatataatgttttctacatgttctaatatttatattccattccattatacatattccatttctgtatataggttatatagaattggaagactatctgccattaaaaagaatgaaatcctgtcatttgcagcaacatggttgaaactggagttcattatcttaagtgaaataatctaggcacaaaaagataaatatcacatgttctcacttatatgtgggagctaataacttgattacatgaaggtggagaatggaaaggtaggtaggaaacagagactggaaaggatgaatggagggtaggagggaaggtgaagagaagagagttaaaaagtgtaaacatatagttaaaagaaataaattcaatgcttgatagcagagtacagtgactacagttaacaaaatgtattatactcaggtgatgaacacctaaatacttgatcactatgcaattatatacgtgtaacaaaatcactatgcactatatacgtgtaaaattaaatgcgtacaaataaaaataataaaatactaatccagtatcattcactgacaatgttaactcaggtggataggcattaagtcaatactactataagaaccacttcttgtttatgttaatgccatatagaatgaaataaaattcactaaaatccaaaaaattagaaaaactatcaaaactcaataatattaagacaacccaataaaaatgtggtcaaaggatttgaacatacatgtcaccaaaaaatatattcaaatttccaataaatacatgtaacaatgttcgacatcgttagtcatcagagaaatacaaaataaaatggtaatgaaatactactagataggcttttacagagactgacaataccaagtattgacaaggatatggagcaactgaaattctcattccttgtggtaagaatgtacaattatataaccacattgaaaaaacaagttttcagtttctttattcacccaaaatatatgtcttttggaaaaaattttttccagtctgtgggttgtcttctcattctcttgatatatgtcttttcaaagaggctgagctttactttagacagtggtcatcaaagtgtgtatatttgtgtttttataatttatatgcatatattcctgtgaaaagatactgtatgcattgttcaacatgtacaaatataagaaagatatagtaaagaaatatatatttctaaatttataaatgtatttattggtgttccacgttgcaaactaaataatctacgttggctaatttaaggaattaaactatagtagaaggttctcatttattgggatgattagaaccagcctttttgcaggctattagcgaatcatagcactagggcttcactgctacctccactgacacctctgacacttgaaacttgaggccagatatctgcccatgctgatagaaaacaactgaataatttaatttgctagataatagaaaagaatcaaatgactctgccacattgcttgccagaagattgtttttctcatttgtgacctcttgcctataaatgatagatagtccctgtgctgcatgctataggtgttcgtaagagagtctgggaatgtgagctttttatatcctatttttgggtggtaaaggtcattctattagtctgttcttaaactgctaatgaagacataccccaaattgggtactttatgaaagaaagaggtttaattgactcacagttcaacatgactggggaggcctaaggaaagttataatcatgggggaaggggaagcacacatgtccttcacatggtagcaggaaggataatgagtaaaagggggaaaaaccccttataaaactatcaaatcccatgagaactcactctcacaagaacacaattagagtaactgcccccatgactcaattacttcccaccaggtccctcccacaacacatggggcttatgggaactacaattcaagatgagatttgggtggggacacagccacaccatttcattccacctctgacccctcccaaatctcgtgttctcacaattcaaatacaatcatgcccttccaacagtccccccaaagtcttaacacatttcagtattaacacaaaagtccaagtccaaagtctaatctgagacaaggcaagtcccttctgcctatgagcctgtaaattcgaaagcaagttagctacttcctagatacaatagggtcacagtcattgggtaaatacacagattccaaacgggaggaattgaccaaaaccaaggggctacaggcctcatggaggtccaaaatccaatagggccattgttaaaccttaaagtttcaaaattatctcctttgacttcatatctcacgtctaggtcatgattatgcaagaggtgggctcccacagctttgggcagctctgcctctgtggctttgcagggtacagccccactccaggctgcttttacaagctagtgttgagtgcctgcagcttttccaggcacatgggtgcaagctgtaggtggatctaccattctgtggtctggaggatggtggccttcatctcacagatccactaggcagtaccccagtggggactctgtgtgggggctctgatcccacatttcccttccacactgccctagcagaggttcaccatgagggctccaccgctgcagcaaacttctgcctgaacatccaagcatttccttacatcctctggaatctaggcggaggtttccagacctcaattgttgacttctctgcaaatgtaggctcaacaccccatggaagctggcaaagcttggggctttcaccttctgaagccatggccttagctgtaccttggcccttattagttaaagctggagcagctgggttgcagggcaccaagtccctatggtgcatacagcaggggggccctggacccagcccacaaaaccaattttccctcctaggcttctgggcctgcgatgagtagggttgccacaaaactgtctgacatgccttggagacattttccctattgtcttattaagatttggctcatagttacttatgcaaatttctgcagcaggcttgaatttctcctcagaaaatgagtttttcttttctatggcatcatcaggttgcaaatttttaaaacttttatgctctgcttcccttttaaaattaagttccaattccaaaccatatctttctggatacataaaactgaatgcttataacagcacccaaatcatatcttgaacactttgcttctcagaaatatcttctaccagataccctaaattatcgctctcaagttcaaagtaccacagatctctagggcaggggcaaaatgccaccagtctctttgctaaagcataacaagagtcacctttgctccagttcccaacaagttcctcatctccatctgagaccaccttagcctggatttcattgtccatatcattatcagcatgttggtcaaagccattcaacaagtctctaggaagtttcaaactttcccacatcttcctatctttttctgaggcctccaaactgttccaacttctgcctgttacccagttgcaaagttactgccacatttctgggtatctttacagcagtgccccactcctggtaccaatttaccatatccatttattctcatgctgataataaagacatacccaaggctgggtagtttataaagaaaaaagaggtttaattgactcacagttcagcatggctggcaaggcctcaggaaacagaatcatggtggaagggaagcaaacacatcctccttcacatggtggcagggagaagaatgagcaaaacgggggaaaaacccttataaagtcatcagatctcatgagaactcactctcttgagaacagcatgagggtaaccatgtccatgattccattacctcccaacgggttcctcccatgacacgtgaagattatgggaactactacaattcaagaggagatttgggtggggacacagccaaaccatgtcagtcatgatatgagaaattatcaaattaagatgtagggaaggtttttaaaagatttgagcaaccacaaatgacagatatgtgctatagtagtgcaaaataccattttgctcttattaaaaatataattgttcttgataatctgaattataaatgtcatggataattatgatgcattatgctctcagcagctaaaacttcaagcaaaatacacacctagagaggaatcagccttaacaataattctataaatttaattttctttatttctgatagttacattttagttgacttcatatgtgatctaaatacattaccattattttggacttatgatgtagctcttgaagtacatatatgatgtagctcttaaagtacatatagaagagcagataaagtatcagttcaccatttctttgtagtttgtgctttcatgatgaatattctcatcaatgtacagattatttgcaggagccttttaaatccatgtgtccattttatgagacttagcttttgtctgtatataatgtgtttattcagtgtgcatggattaatttgagagagcacaggtatgggtatctttacagcagtgccccactcctggcaccaatttactgtattagtttattctcatgctactaataaagactatatatcacaataaactgagaaccagctggtaaatgagagaactgtggtccaccttttcattgtggagttctcattttccttagcttatgctgcttattcaacactatttctgcataatctaatgcattcactaaatgaaggtgctgtgttagcctccacatgatattaatacagcctatttaatttatccttctttagattaaaaataaataagtagtcatgtgccacagaatgacacttcagtcatttggtcattgaaggaccacatctattactgtggtccaataagattataataacatatttttcctgtacattttcattgttctgatatgttttgatacataaatgcttaccatcgtgttagagttgcctgcagtattcagtacagtaacatgctgtacacctaggagcaacaggctataccacataccttaggtgtatagttaggttataccatctaggtttgtataagtacactctatgatgttctcacaatgaacaaaatcacctaatgatgcatttctcaaaacatgtccctgtcattaatacagtatgtaacaatacagttagtacaatatgtaatacatgactatattcagaattttagctatttctcttatatttcaaatggattttcttatgcactgtgtggcacgggcatttcattttagtaaccacagtctgggaaaggagaagtctttgaaggatgttgagcaaggttatgacatggccagatgtgaatttttgatcagtgactccatgttagcagataaagttgtattgggaaagatcaaaagcatgaaggccagataagaggatactgtatgttatcatggatggaaatgtgagggatggcaggagagatgctatgattgaatgaatctcaatattcttggtgatcaaagaataatgagactcatgcaataagactctgtgaatgattgaatgtagttcctaagctaggaggaagaatgaggaatgattttctggttcctgactacagcacaagttttggatttttagaacaaagaataaatttgtacatgctttatgattcctggttgaatttttaaggataaaaaagtcagctgtaatattattctttcctgataccatgcagtatttgtatcagtgatcttattcattccacacacattcttcttgaacctggacactgctctagacactgattctttccaaatatcagataaggttattcttatgtagaccctcagttcatataaatatgattttcccaaaatgtgaaataagtgacttttcataagatattttttaaaagaatgtcttaataataaattgtgaatgttgcatggaaatgtaggtgacttgcattgtgcatcctgtgtttgattcactgctcttgcatgtcttgcctttagctgggatgacagcagttcagtgagcagtggtctcagtgacacccttgataacatcagcactgatgacctgaacaccacatcctctgtcagctcttactccaacatcaccgtcccctctaggaagaatactcaggtgagaattaccacctttctttttccagtgtttctgccagctttttccccaaaattacttaatattagattaaggtatagcacaagcccttaatccaaaattattacagaaactggaaaatgcagagataataaggactccctttgccactcctgaaccctgaagcatctttcatcttagtctttcctaaagccacaacccttaggaggagcaacaatgtgcactgcagccaattttgaataaacagaagcagcatatatatatatatatatatatatatatatatatatatgatatacattacatatttatatatatgtaatatatgtgccatatagcctggtggtatagttatctatacaaatatatttatttattgttaatatatagagtatataaatatctatttatataatagatatttatatatattaaatatataaaaatatataacatataatagatatatattttatatattatataaatatatatttatatatttaatatattaatgatgaattactatatttgtatagataactacaccaccaagctatatggtgtgtatatattaatatataatgtataattctatattaatataatagtaacatatcaatacttaatataatatatattcaattgattacaatctaattcagaaagatttatgttgccatatctctccttacaatatcgatatgtttgtttaaaaatccagcaattattttcatagtctaattttagatagttcttgattaattttatatgatctctgaaatatatcactggatctgttgtgaatgataaatcaaaaatgaaaaatggacattacatcattaagttctagcttgtcttactacttcttatgacatttgatatagaaaatttctacctttctgtagcgtttaattggtgttttctgcatgtatttattctgaaattctctaatatctgcaagtgggaattatgtggctaaaattaataaaatgtaagtgaaggtaaatcaaaatagaatctttggatttatccagttatctgaaagtacatttcattgccttaattcatactttataaatttttctacataaagtttttctgtaatatttgtctttatagctgaggacagattcagagaaacgctccaccacagacgagacctgggatagtcctgaggaactgaaaaaaccagaagaagattttgacagccatggggatgctggtggcaagtggaagactgtgtcctctggacttcctgaagaccccgagaaggcagggcagaaagcttccctgtctgtttcacagacaggttcctggagaagaggcatgtctgcccaaggaggggcgccatctaggcagaaagctggaacaagtgcactcaaaacacccggtaggcttgtcgtttgccagctgttatgcaaaagtgctttactttattgtttccattcaatctttgttttctctaacaatagcatttctaaaataccaaattcttatccatattaaacatggagtcaaatagttaaatagtttttctgtctacgtttcacaaactcgtcatagaagcccaagtagggcctatatctaggcattctctggaaagcctcctcataaactaggggtactggatgccttaccttgccagagttatttcaggtaatggggaaataagattaggttgctaaagcaacagttaagtttttttgtttttgttctgcgttcttaatgaaagtttggaatttttacactaaatatgccactgaattgcactacagactctgagaggaacaagcaatgacactaatcaattggaatgctggagatttgaaatattgtctgtgtattagacttcatgaaagaagagaatgaaatagttcttcaaaattgtgccatactttttttaaaaagactctccccgtatttttaaaataatgcctaattataaatagtgccacctgaagcactaattaacagggtactccaaatataatcatctcacagatattcaaatgaattctttttctagtaattagcttgatagggttaagtgttatctttttaaaaagagttgcaaaatataagacattaacaaatagcaaaacatatgttttcattttatctcttccatctctcataatgtttcttctgacagccaaatttttgtagctatgcactcagtcctctcaatatatgagatttttgatctaagacaatacatttaggaagggaaataatataaagaagcattcacattttacacattgtttcacgaagtgtggtgatatcaaactctacaggcacatatatttgtgtatttctccttaattagggaaaaccgatgatgccaaagcttctgagaaaggaaaagctcccctaaaaggatcatctctacaaagatctccttcagatgcaggaaaaagcagtggagatgaagggaaaaagcccccctcaggcattggaagatcgactgccaccagctcctttggctttaagaaaccaagtggagtagggtcatctgccatgatcaccagcagtggagcaaccataacaagtggctctgcaacactgggtaaaattccaaaatctgctgccattggcgggaagtcaaatgcagggagaaaaaccagtttggacggttcacagaatcaggatgatgttgtgctgcatgttagctcaaagactaccctacaatatcgcagcttgccccgcccttcaaaatccagcaccagtggcattcctggccgaggaggccacagatccagtaccagcagtattgattccaacgtcagcagcaagtctgctggggccaccacctcgaaactgagagaaccaactaaaattgggtcagggcgctcgagtcctgtcaccgtcaaccaaacagacaaggaaaaggaaaaagtagcagtctcagattcagaaagtgtttctttgtcaggttcccccaaatccagccccacctctgccagcgcctgtggtgcacaaggtctcaggcagccaggatccaagtatccagatattgcctcacccacatttcgaaggtaaggatgtataaaatgatgctggaaaaatataaaggataaatatgtgttagacacatacattacatataaatgtgtgtatatatatattttaaatatgtataaggtatatatatatcttagaattctttaaagtacacagtgagctctatgaagcttatcatataaacagctagcaaaaaaaatagttctcattttgagaaacagtcaaacttcaaagtttcactgtcattgtgatactagcaacacaaacaacatctaagagacttaaaagctgatggtaatacctaagtgtagtgataaggcaaagtaatagcttgtaaaatttctatagatttccattcctccttttcacattaaaaattaaaaccaaataggttttcatgacttttggcattcatttccagtgtcattttcttgctggctcttaatgagttggtgatcataaatgtagatgaagttgttttccttgtaacagattccattggacagatttatacagtgtcatatcttgacacattaaagacaatcaagatatgacataatttgaaactattccagtgtttggtacagtatcacaactgaagagtgggctaagctttctaactcttcatctgctttctttgacatgactctggtaaggatcatgacttggtttctgttcctggattgtttttggtgttaaatatgtgaagttctgctctaagatatcactgtttttaaatacccatgtgtttttaagtggtaggaaaataaatgcagttaaaaattggggacaaatatctaaacctctctgagtctgttttctcatctgcaaaatggtagagtgtggtttatagttcattatgggttcaatatttttaatgtttgtttttattctgttgactaaacccagaactttgatatcttggaaaggaaagattttgaaacatttattttacaataaagcaatttcagatacctgattgtttgaaaaacctaaaggctttattcctccgtagtaatattaatgctgcagaactgtctttttaaaatactgattctcattgggaagaatgaattatggcgtatagggagagtaaatatttctgtttcttaagtaaaagccaatagtgccctcctgtggcccattacctatgaaacaatttctcatattcgtcataaaatatttcactgtaggaaatatggatttcattgcaactcaattagtaatcattatgccattacttcatatcattgtatttccatatttacataaatttgattctaccatctgcttcatttacaaaactaaaatgttttctgaactaaactccaaaatctaacagcaccagctctgtttcaaatcactattaaaaaatgtatttgaatagcactggcaactgacataaaaccctttggcctctgctggggaaaatacagacaaactgacttgttgccgacaatgtcaatattgtttccaaccaactgctccctgacagtgactcagaccaccagatactcaacacaactccctaaacttgctttaagcgttccatctagattttgaataaactgtttaaaaatttaaaaataaaaaaaaaagagaagagctcatttaagtgttgtctatcgaatgcgtagaagttgtttcattataatggttctgtaaataggtaacagcaagtatatggtcaaactactgactttgagtgaaagtctcatgatcacttaaattatgaaaaccaggggttttcatgtttgacttacttttgttccacccacttcccctctttccctagtagcagctcagtactgacctacccttatatgagagattttctgcacttgataaagaagtccaagcttataaaagttcattaacatagagacaggaagtgctttgtagttcagtacatcaaagcacacttggctctgtgtactgtaacccgaaatattaaatgtggatattagcttcttggaacaactgaagttgttatttgtttttcttttaggttgtttggtgccaaggcaggtggcaaatctgcctctgcacctaatactgagggtgtgaaatcttcctcagtaatgcccagccctagtaccacattagcgcggcaaggcagtctggagtcaccgtcgtccggtacgggcagcatgggcagtgctggtgggctaagcggcagcagcagccctctcttcaataaaccctcagacttaactacagatgttataagcttaagtcactcgttggcctccagcccagcatcggttcactctttcacatcaggtggtctcgtgtgggctgccaatatgagcagttcctctgcaggcagcaaggatactccgagctaccagtccatgactagcctccacacgagctctgagtccattgacctccccctcagccatcatggctccttgtctggactgaccacaggcactcacgaggtccagagcctgctcatgagaacgggtagtgtgagatctactctctcagaaaggtgagctttcctggaggcattgataacatcttccccctcttccctgcactatgcctaacccccaccccattaaattcccttgatttcactgtgagtgccccggtgcaaaaagatgtaagactgatgaaaccgggcctttcatttgctctcattaccaaatttacagaggaatagaatcattaaaggtagggtgagtggataattttgttaatatgaatgcatacatttatacccagtaggcaatgtgaataaaattcaaggaatgtatttagatattgaatgaggtctcctgaagacattttaatgatttggcttaagcttcagaacaacactagctccttatgatgacttaagcattttgaaagaccaaattgaaattattctatagttatgctcagagcaatatgttaaatttgttccatttgtacttctatgaaaaaatagcagatggattgctgggaaatcctagttggcctggttaaaaaaaaaaaaaaaaaaatcaattgtcagccatgaatcattagagaaaattatagtgtcagtgccattttcaatagactgcttaaaaagtaatcatattacaaagtgtttctcattggctttatatatatatataaacttaaagtagaggacatagcaaggcatttcttacctaatatgcttactgtgaagcatcccttttgagcaaaatcactctaaattttctcctcaaagtgatcctctcttgattatactgtactgactcttaccaccaggaaaatgtcttaaaaccacttctttttcctgataaatgcaatgctatttgtctcttgacataagtaaagctttaaacatggtcttggccacatgtggaaagaaatactggtcacgtaaaatacctgatatatctttctatgtcttcccctgttttttttattttttttttatttttattttttaactctgatattgatgatggcatttattttctagaccttcagccttactcccggaatgatatttttaaacatcaattaaagcccttagctagacactctctgcattacgccagtttccctttaatgtaggatgtcccaatttgaaattccccattttctcttgactttgtaaaaacaaaacccagagcaaaacattgcttctttccctctttacttcctacttgcctaacaatgagacagggacagccgtgcaaatggggcttcccgatgataaagtaattttaacactaactaaaatattggtgtttcctatggtgggctgctaattacaaaatacatttttcctcctaaagaaaaaaactgggccaaggcaaacagctcagtgatagcaaataaaatgtaaccatttccctatggttttgctgttatatgctattatagacagcatacgtaaagaccagtaagggttcatttttccacctaaaatgtcgggcttcctgtaaaatctttgattctagtttcagcacttctaaggtaaatgggcatcttcacatgtcatttataaaacttctaatgaatgaattatattaaaatagataaacaacctatagttttaatgaatgtatcctagattgtatgctcatatgtaaggattctaaatatcaacttgataaccaaaccaaacatagtgcaaataggttatcatttattaaccacaaccaccttccacaaaactggtcattttttaattattaagataatctgcaacaagttggccatttagccatcagcctatttcttcagcatttagacattaatccaagattcagaaataaagtcaagtaactatttataaccaagtaacattcaaatcaaaactagatgaaagattggttagttgcatagctataaccaaaatgcagttttaatattttactctaatctatattttaactgaagtcaataaaattttcactatggaaatacactagaaaatatgcaatttcttattctttttaagcagatttatttattgtacatgttcagtctttgaaataggccaattttatttatgttatgttatgttatgttatttatttgttttgaaatggagcctcactctgtcgcccaggctggagggcagtggtgccatctcagctcattgcgtcctctgcttcccgagttcaagcaattctcatgcctcagccacctgagtagctggggttataggagcggaccaccatgctgggctaatttttgtattttttgtagagatgaagtttcaccatgttggccaggctggtctcgaactcctgacttcaagcgatctaccctccttggcctcccaaagtgtggggattacaggtgtgagccgtggcaccagcctgaaataggccaatttttaaaatgggagtattcctacattaaaatggccaaataaagactttttctaaaataaactttaaactaattttggataaatatgttttgcctttgagccttaataaaatgcattaatgaatattaagctgtaaaaagtacatgttaactacatagctatagtgtataatattaatattaattagtgccttccagtaaattactagattaaaataaattttaatataagacactgagctttttgttttcttgacaatagaaatgcaagcaatagcaaattgctctaatcctttcaagtacatttaagaaagtttatgacctattgaagagaaaagtagatctagtgggtgatactggcttcattatggttaattaattgatcagtagaatgtcagaaatgctaagaaaaccaaagaactacaccagagagaaaatgtgttaatgtaaattttaaggcaagttaattagcgatatataataaagatgtatataagttcatgatttacctgtttgtctacaattttagatgattttttgatactcatatttaaatcggtagcttttcctatagattttaatttttgtttaaattcctcttcattaaattaaataaaataataaaatacactttttaacagttttctcttctgcagctgctctaggtcattggtggccattgagccataactagtctatatttgttttgggttttgtttcatgtgtctgactcaactaaatttttaaataatttgtagtaaccaactttgcaaattctgggtttgtctttaaatgtcagatctggcaacgctgccttgacatttctgcctagaaactattggctctaggcagtcagtgcctgtctgcttcagactgttgactgaaatccccattcgttttcatgccctatctggcccttgctggcatatgagtttgcaacctttggtgatttgcagaaattgtctatgttagaaaatcattaatatctagattcaaacatatttctaaataaagctttaaattattatggtaactttaaatgtatttattctaatttttttcattaaattgctcttcatcatataaatatataatttttatacaactggatgagtttggcagaagaataccaacttttcatattctttgtggcattaaactttaacttgtacacatggaaataaataatccttaaaatgacttatgaccacataaatgccttagcacatgtggttcatatttggagatttctcatatttgttcaatataatttattttgtttgtttatccacagtacttaagaaaacttctatagtcaacatatatactgtaactggcctctacacagtataagcaattaccttacatggctattaccgataaagttaaagttgtataaagcctttggatgcttttgatttcagtgctaaataatggagtacacatagaagaaaacattttagctttggtttgagtgatcaaattttaggtcagcctttttacattcatgttatatcatccccattatgcgtatcctgtgtatttaattttgatcatttgatgtcctaaaggaagaaagctataattctgcaattttaattaattttacactttgcttatccacatgccagagattataaaagaaatccctaaacttgtcccacttagttgttgatatcctcttcctgtatttttagagaggccatttcttattttctctagacatagcttttcattccttcttgttaccaattgtgaattccttaaaatagagatgataaaatttatagccttttaaatacctaatttatgatttctaaaagatggtatagcttaatttcattaaaatattcaaataaatgatactagaatcaattaagttttaagcaaacattcatatatctttcttcacatgtataaatgggaaataaacatgcctttttattaaaaataatttgaagacaaaagataagtattaaacaatgttttataccatctctgtcaattggaagttgtcactctaacttagccagagcagatctatctcattttgcatgtgatatcatagcaaaagtctaatcagttgcatagggaaggaaaaactaagatagtatttaatcaataggattcagaggaaaattatgctaatgtgatttaatctattttctagtaatcctatcactaaactgtcattgaattgtactgcattagaaaggaactcaaatatgtgtgacggcaatggacatcttgtcacctttagttggcctttttcaatgagttaagcattatatgtgtgttaccaaaaaattattttttatagttcagagaaccatttttgttggatgtgtaatttggaagttttgtttacattatgtccttaggggttttctttgttttaacagcatgcagcttgacagaaatacactacccaaaaagggactaaggtatatattcctctcagcacaattgctacctctctgttgttatgtaaactttgtgtgctgtctctcttccttctttgtttgtttgcaatgtagcacatgacattgaggacgaaatcacttttaattttgatggtttctctggcccgaacagttggtgagatagccccttaggtagagatactagtagagattgaggctgtctctcaaattaaataaattccaatgtgaatatcactattttgaagaaataatactaaacaaacaaacaaacaaaacaaaaacaaacaaacaaaaaacttgtcccaggcattacttttttgggggcagcaactttggtagaatgcagaactcacttcaacaaattaaaataaaattaactcttctaacttttgcctattagagtcatatgcatgcaaatattcaaaacccatgcagtctacagatgtgggcagttaatgttgataggttgaaggatgctacaatctgaatcaaagaaaacatattttcatcatcacaggacaaatgctgtaattaaggtgtgatttttatagaatccttttgataaaatctcaaaattgttttaatttctattttgcaggggtactgctatcagatcaatttaaatctgaattaatctaatatttaataatctcaaaataattattccatccataataaaaaataaaataaaaatttaacttatggccatcttttactgtgtacttttatctgaggaagagatagaatgatctactaatagaggtataacactgtatgtgtatgaaaagttggctaattttggtgctaagaatttacttacaaaaagaaaaagaatatacttagtttggtgaaacactgaataatggcgaaactaggtctttctccattattttttttctctccaatttttcagcaatagcaaatagctggcaattattccatgttaatattttgatccagaaatttatgttccagtaaagcgagcacatctccctccttatttttgtaatctaggcatgatgtcaagtggcagtttaacaaaagaactgtttttcctttaaaaaaaaaaaaaaacaaaagctgccaatatgtattccatttccctatgccttctgtgaccatccttcatttcccttggccctggcccgccactgtcctccatttgtagtccatgttttcaccctctttacatcctttcttgccctgtgcttttgagttctcaattaacttggctgtctgctcattgcttatgatttccaactgcatatctgatagaagcataattttctcctcaaaaccctttatcttattttttttccctatgtgattcaaacagatggcgtaagatcatctggaagaactgagcaattataattagattcaatctgtttgaaattgttcattctgaatagtaacctcctctgaattgttttcctgtcctggcattgccttgcccttgtagatgtgcttaagtgtcatagctgtgctgttttgcagatataccccatcatctcggcaggccaaccaagaagagggcaaagagtggttgcgttctcattctactggagggcttcaggacactggcaaccagtcacctctggtttccccttctgccatgtcatcttctgcagctggaaaataccacttttctaacttgggtaaaatattctaaaatattgattttgttttgtttctttcaccacccactctcacagaaaccctggaatctctccataacacaacacgttttcatttaaagggagggataaaagcactttaacagtacctttcatttgtgtcattgtttactcttcacagaaaaatctccaaacattatgctatttattgctcatgacaaatgcttaacatagattaatactgtggttgttttctagtctaggctccagaggctcagaaagttcacttgacttgaaaaagtcttaccattactaagggttcaaggcagtaaccagttcagaacatctgactttaatcccaggggcctttccattccatttaagaatcctcttaaaaaacaggaaggcatctccttatttatttgtctgaaatattaaaacatccttaaaacaaaattagtaatcttttgtagaaaatagaaacaattaggaagaaaaaaatatgtaattccatgactcaaagttaacttcttttaacactgttaaagttaaaactccttaaaattcatacaagaatttctgttaagacaatactctgaacattttcaaatagatacaatgaaaaataaattaccaacttagtcattgggttactttgtatttaacatcatttgtatgaaatataaaatcatttgcataaaatttcattaaaagcactctgagtaacaaaataattaaagaaaactaaacatgccagataccatttaatagattcaatgactttaaaaatatatttattttctataaagtcacatataaagtattctcattatttttatggtaaatatttttattattagtttatcagaaaaacttgtacataaagatgagtattgatacataatcttattagagccagagacgatcattccttctagaaaaacacatctctgaatttaggacggaggacaatgaaacaagaaatttcactttataatttacctttgtcaaactatcccagagcacatcaattccatcatgaaagtactcctttgacattatataaaaaattagtaatagaaaacacacaatccaaaaccttatattttctaaacttcaagttaatcatcaacttctcttagatttttgaagacctgaaaataaacataatttcaaataacagaactcaaacaccatatacatttgtaatgaggcacaacagtcaattttgagccttgtattttccaggttttagctgaataatcttcactgctttcttagctttttgccagtctagtttggggactattttgccttactgggcctaaacagagtgtaatattaaaatatgttaataagccatactgagaataagataaatgcaggtttctaactccttagggacacaagtggggacaacacattccatgaacacaggtgaatgaatgcccctagtttctctgagttggacaatttcatgcgatcatttttttctctgaggccaaagtctctggtttgatcttcctagcagcttccagaacagaaagtgagtttactttgtctccatattctttttctgcatgctcgggaatcccctgctttcctgatcccaccacaaaaactcccctgaggatgaagccttggctttccaggcttccagggaagcctcgattcctggctggaggtagttgtaccacactcccagagggctaaatcccataaacatcatcttctgtctttgtagatcatagaactttttattatcatccaggaagatttctcttttgaaacaaggctggaaaaactttatgtcagtcctgacctgctctttaatgactgcgtagagggagatgcccagcttatccaacttgggttgcagggaggacagatctgcagcccctcttgccagagaaaacatcctggcacagacacaatcacaactccattcttctcccgatagctcctttgctttgaaactcattggttacttctccagtgttttcaggtctatattctccaggtactccagcacctctttccagggcttggacaaaaatacatctgtgttggccagcatcagtgccaaggcagcagcctccaagggctcctgcacccatggaccacatccacacagagaagcaccgtgggtcctcaagtgcctccctcttcttcccttctcccaaacctgaagcccagacactaaggggtcaaaccctcctgggccctgagggttccaagggcctcattactttttctttttttcactggaaaaaaaattctaatcatgcacctacagaagattgacatttttcagtaagttggactttccagctttcagccaggacaagactcaaggctatgtcttttctattgcaacccttcccactatattgagtagggcttttagcaattgaaaacaattattttggtcatggtttcatataagctaatgatttcatatcaaacaccaagtttttgtttcctaacctatatagtgataagagaatttacctataatgccaaagaatgtatagcttttatttgctttaagatgcagttgattttttaaaaaagcgaaaagcctaacactttaacttcaaaaaatgaatttaaaatgtttgtgtaggtcataggaatatgaaaaaattttatacaacatctaaaacacacccaaatcacctaaagtgctataagcttgctaagtacttcatgtctcctatcaattctttcattaattgacgttaatttgattagttgactccttcttctatttttcctcaccattattattctgattaaatccaccttcattattccttaggaacaaaaagactcaccacttaactatgtctgacattggtgaagtcgtttaaacttaattttcttatctcttgaatggatacataatacctaggttatattgtaaagaatgacggatatagtgtatgtaaagatggagaagtgtgtaagacttgacagattctgccaaatcattattttcactggaaagcatgtcttacacgatcatagagtagcattcatcagatatgcctgagctttgtctacatttaattgagtagtaattcgcaacacagtaaccacaggattttatgtaaaagacattcacagattgtgtttttgaaagattgtatttttgaagtacaaaactatgacattgttatcaaggactcatttaccacaaatatcaaatatttgtgcaaagataagtttatgctaagatttgcataaattaaagttaacatggcaactgaagctaacatgtccatggtcacaatgtgttaaaaaatgaatggttctgtagcacacttgggaatgtattttattacatagttttcagagttaaaacacaattaataaatgaaatgtgaattatacttttactgacaacaaagctctctgtagagctttaatgttctaatgaattagaaaaccactgatcaaatacatcccttacatttcattgctatagaaaccaagtctgaaaggttaagtttacctttctaggatgtgggtttccccccttaatctattgtggtttatatcagagatctctcagctgtgtcagacaggccatgacttaagtgacactgccctcttgattctcttcatacttttccaactacaattctttctcctggggttgctcatcttaacatagctgtatcatttattgtagacacaaggtcacttttgagagtgaatgggactatattaataattgttccaggtattaggtgcaaaccctgggcaatgcaattcatcctccatctcctccttatatttatgtgtttaccaagttgtttttcctgtagacttttttttatcctaaaccctttttctatgttctcattcacaactttaattctaatctctcaaatcaacatttcactttctgtctgagacctttttcagctctaaaactaaaatcccatcagtgtgctagaccatatagccacctgaaatcaaagtcttttcttaagttcttttcttctatttgtcttataatttcatgtatcatccttctctctactctagcacaaaatctgtgtaatcaatagtcttacttgaaactgtgctcttcatattgtacattttcaatagacaggaacctgtgattttatcttcagaatatctcctacatctgtctctcattttcagggacattgtccttgctgaagcttttttaactatagacaattgcagcagattttaaattgatcttactctgtcgactcccttatgtttcaacattttcacccattggaaggtataaaagaagatattcctgtccgtgtcaacataatctcatgtacctctccagatcttagaaacacgtatggcttcaaatcaggcattttgagatctttatgctgtatggtttcagagtggaaaaaatgattgattcaaaaacataatatttaaagagtttttattgtatttacagttcacctgaacctctgttcattgggcaagaaaatgagtactcttaaaatgcaataataaattaaagttactttattattaaattttaaatatatatatatatacttaccttaaatatgtcctcttgttgtcttttagcatcacccatttttgatttgaccattatcttttctgaataatcagtaagatacagaattattattaatgttcaaaagttgcagtattcatgttttctttattctttctaccaattaaaatgtgttaatatataaaatttttagaaattttactataaaaaatcacaacatatattagaaaattaagatcactacaatatgtcatatttagtagactactgtgagctactgccacagtaaactatggttcgtgtgtcgttcccagcatgctagccctagtagaaaccattcccattcaagaaagactaacaaagtatagcttacataaatcaaaaagtctttggatgaaacttcatttgggaaaataacccaatctctacccttcaattttttatgaatgaaaaaatggaagaataaaggcctctaagatccattcaaagccaggagacacacaagaatttctaaatagaagagaaacagaagaggtcatagttcttgtgagccatctcataacctggtgagactcattgtcatgcctccatgcatgataacaatcgctcagattcatttttcatcttgccacaagggttacatgcaggaacattaatgtcaacctgtcacttctaatatccatctaatattctctaaattcgatggatccttttgcatatggtgattgttaaacacctttgcataggaacagtttctatgcttttgtactcaaatcttcctctaccttgaatcctttcccatcttcgtgttcaaccttcaatcttctcagaatgaactcctgtcttctattctttcggaagcatagaatctcacagtcagaagagaccacatctggttcaacccttcatctcttatgtaaaattttatgacatctctagcttcttctttaaacccaccaatgacagaaactactaaaatctagaaataacacctttgaaattctttctttaagagatcaaataaaattttcctgaatcttcacctattgttcctagttatatatatccagattctacaaaataagtcaaagttagattgcatatgacagctcttcatatttaaaacaatataataaactcactagttaatgtctagctgtagatgcaaaagtagagagtgacttggggttatttaagaacccagtccagccagacacattggatcatgcctgtaataccagcagcactcaggaggctggggcaagaggatcccttgtccaggagttacaggctacagtgagctatgatcgtggcactgcatactccagcctggaagacagagtgagaccctgtctcacaataatagtatttaataatatcataaaaacccagtccacatttatataggatcctgttttcctcaagttactacaaataaatatataatcttaataaaaggttagtggctttgccaagatagtggcttggctatgcaaatgcaatttaagacaaagttggtagccctctttttcctaatacattgccatatctgtttctcttctatttggaaattcttgtgtgtctcttggcttcgaatggatcttatagtccttttattcttccattttttagtcataaaaaaactgaagggtagtgattgggttatttgcccaaagcagatggaaagcaaaactaccactagaagctctttaccaatttgtgttccattcaaaaaattatctttgtatgtcttacatttgtcttctactgtatagtttttcttgttctattttacatattaacttttctccttcttcagacatctgccctactggctactcttgaaatcagagactgtgtcatatttttccttctattcaactacaacatctaaaagcagatctgtcatagttattaacttaattgaacactcttaaatagttaggtgtaatttccaatgcagaagctatcaaaagggtttgtaaatgcaaactattccctttaaaatctatcctaatcctcattaatgtttcatcttgatagagctaagtattatgtattgaaattgtagaagtacacttcacttggatatctctgcaatcatttaggtaagaattatacaaagccaaaaagcaaataaaatatcctcctaaccctatagatacgtatactaaaatgatgcacttgcaaatttgtttaatacttcattaatttaaacaagagtaaattcatactgtgaaccaagaatagggtgacttaccccaatcttgccaccttaaacataaacattttaagtcttcaatgtcctacagtgtacctactggctgttgtcactaatcagaccgaaatggtactaatggtcactgcaggctgaaggaatatgcttgaaagataggcagatcctctccctctcccttttttacttttttcgcctttccatcctttcttctttttttccaatagattgtgcactttggagattcatattttcttccttttccattacattttaaatatgtgattcttagtcctatgcttccttttactccaatcaataactggctctatcagagggttgttctgtgtgttaattcggttaataccaggattatcaagcacagtgccttccaaatgtgagatacttctctccggttacctctgggtttacttttcctgttttacattgttttgagagccagtacttgtattaagaagaagtttagtgcctgtgtcacagaaaaaatcttagtaaattttgaagtgatgtcagaacaactctaagccactgacggattccacagggttttgaaaatactcgttagttccctttatatcttaagaggctcctgcctgctttctcatataccagtaacaaacttgcttttcttaaatatgagcatttagaatatctttctcaatttttctgttttgcttttattccaaatttcacaactatattgttttccaatgtagttgtacatacaatcaaccaaatctttccttaaattgatgactaccaggtgaggactctttggcaataagcaataagaaaataaattgttattaaaaattacagacttaagatacttctttggaaatataacatgtttgtgacttttgaccatctcatcatgatatgctcatcttaaacagagtagaaaatcatttcatataattaactttatggtgggctgcagataccatgtatgttacattgtgtttagttataaaaatgtttattatacactatttccttataatctaactttgataataatgatggtcctaatcatgaacttacatcaattaagagcttgaagtgactgagagtatttgcctggaagcatttaaagcccttcttgggaaatttagatgttttatattttactttctttttgattttgctttttccattaaagtgattactatttttaaagagaaaaccgaaaactctagaaagaccatcttttcttcataacaggtagcagaaaacaccatgttattacatttctagcaagagcagtagaggtgacttgttggttttgtgtactgttgctttagaaattgatgtaaggcttcccataaacgtgccagaggaaaagagggacgcaatgggatctgttattgaacatttcagaggcagactcttaccttaaatagggactcactatacattcatgttttcataagtattgggatcatgttcttactttctatcaacctgctattttcatctttcaagcttaagagtaataggctctgtgtgttttgtttttcagtgagcccaacaaatttgtctcagtttaaccttcccgggcccagcatgatgcgctcaaacagcatcccagcccaagactcttccttcgatctctatgatgactcccagctttgtgggagtgccacttctctggaggaaagacctcgtgccatcagtcattcgggctcattcagagacagcatggaagaaggtaagcgttgagggggattaaagatgaagtcactttatttaaaccctgagagggaaaccattgtgtcactcacatcacaaagattcctgaagaggaaaataaactagtgtaattatcatttgggaaactagaagcttgaagaagttttattctgtattatcttctatttctttatgtatttggaaatatgccagaatttgtttatattaatacttggctgtagaagagtttagactaaatctacttttccaatacagaaatatacatataaactattttcccaggtgcatcaaatatcagagcaaatgttttgtttgacattttggttaaagagccataaagacacacaaaccagaaacattattttatgaaaataccacatgttgctgacttttattcccaggaattccctctggtgctaattttttattatatcattttagaattcatattgtacctacttttttgctttataagtcactatttcttcatccaatggcaataaaattgtcacctaacctaataaatatctttatagttatatagttctatgtaaatactccaaataaatcagcttgaaaacctcaggaagctgagttgatgctcaaatatatatatttttgtaaactgtagaagctcaaatgtcaaatttaacaataatttgagagacttttctctttgatttaatgaatttttttagtatccataaagaaaacttacagcatacatattataaagcatgtcagctaaggataaaataaaactagacatacaaattcaaactgattagaatgaaattattaaccctaataattatgtttaaaagaaaagtctccaaatcttgagacataccagagtttaagtcttcagccatccatttacttgtggtataaacttaggcaagtttcttaaccttcttatccctaagttctgcatctgtaacttcttaggtttgtcacaaggatgaaatatgagaacaaagaataattctgttccatgatcttttcccttcctaccttcttatttaaagtatcttctgactgaggggttaggcagcaatgaaaattgactcatgtttttcaggtcaccactatggattcaatatactggcattaaatcagtagagaatagttgtcattgccttttgcaatattaaccaaaccactcagttcactgtgacagacagtgaattatatccaatgactccactgattttttccatgtagatagacaaaatataactactctcaaatgtaaggaccctgctttctgaaatggttctgttgctctcttcacagataggcttcttataatacttttaaaataatttgctaagcatacagatggctttctagagtgtggcattgacaaataaagtgatttttatatactgggaaattctggccttcaatgtatcaggattaaataatctgaatttctgaaagctagcctaagtgggcaagatggcttttttgtgctcacgcattgaatactgaactattctagttcttaaatggcgatctagattcaagacttattgaactagattgaagggactttattgatatcctacctaatgctcacactgacagatgaagagactgagccacatgttctaaggtcataaacagaaagaatgagaatgagatggtctaattaattgtccacctttcctatggtacatcagggtaacactttagtttacgagggtattattagagatagaaagaatttttttttaaataattgactcaaataccaacattttgcacattacatagagtaatagctttgcccaagttagaaaactgggggttcttctttattcctcttttgaccacatctatatactcagttttaaaaaggttcttcctggtatccttcaattccatccccatgttttcatctacaagcctagtgcagctattccagccgtctcctgatcaggtcttaagcacctcccatatgtccttgtagtacccaccatattgatctcagtagcaatcacagtactctattgtaaatatcttttaaattattatcttctctttgagcttttgggattttatcttatttatttttgtagttccaggatctagcaacagcttgtcacatcgttcatactcaactaatgtttgtttaatgcacaatgagcagaaataaacatactactccatagtaaaaagaggatgaacttttctgcaaatattaatcagcaccattttatccaccttttgggtttagtacattggaagtataggagtataaagcagaatgtccaatgtttacagtgatattttgaaatagataaaagccagtgcgacatttccattctcaatttctctgagacatcaccttgaaaaaaaaaagtatttttctcttcctaaaattagtaaaggaacagtaattccacatttataagagtatgatcaacgcatcacagataatgttgtaataacacattagataaaagtgcttattttcctgaaattatatggagaaaaaaatctgaaagtggacctttgttggatacaaatgaaataaataaggtacatacattttttaaggttcgaaagtttatggcaactttagtttgggtttccatgctattctatttattatatgggaatttactgtagctttcaacatgtacgaaacaggctggtagggctcatgcttgtaggcttctgtctaataacttggcaactgaggtactttagggagtatggatggggctcttccatgtctcaacgtcctgactgccaaaaaattatagcaggctggttctcagaatcttatagttagttgttattacttaatttccctaaccacccgttctttactttttctgtaaaggctggaatttttgagtagaccttattgttttaactctattgttctgtttgttttctccagttcatggctcttcattatcactggtgtccagcacttcttctctttactctacagtaagtaatggctgttaagaaaaagcttgtgcttttgccatgcacacagatgatgaaatagatcattttactgtgaacagatcacattcatctatgacttgcacaggagttgtgtagcaaaataacggcatactctaagctgcccaatacccaataaagtgccaggtgctccacctgccattctttggtcacttacatgtgctttcacttggcttttgtgcactcatcataatcaatgagtggatgtagaattcgatttcataaaacctactgaggtatgacttggagtctctgaaaccatgtatgtagtctgctatactatcattttagtaatgacgagttgtccatgttttgttctttgagccgtgactgttaattgttctatagtattttcttctcattttttatttttaagtttattgttgagaggattatcgaagggtaaaagcagtaagggtaaagggtaaaagcataaaagaaccagagatgtttttttttaaatataccttttgaaagagtgtgatttttttaacttttatttttattttattttatttatttatttatttatttttgagtcgaggtcttgctttgtcacccaggctggagtacaatgacacaatcatagctcactgcaaccttgaactcctgggctcaagttatccttctgcctcagcctgtcaagcagctaggactacaggcatgcaccaccatgcccagctaatttttaaattgttttagagacaaggtcattgctatattgaccagactgatcaatacccatggcttcaagcaattcctcctgctttagcctccccaagtgctgggattacaggtgtaagccagcacacttagatagaaactttatttattaagagaaaaataccagtgtttcaagttcttttgcaaacgtgtgacattataattcatttttgacaaggagagtttttctgtttggtaaatacaattctatcttttttaaaaaagtagcctacaggaagttatattttatgagtgagtctttttagagctaggttaacagtgaggtatatttaaaagcagcctactgaatctcaatgggacttgagtactatgaataagccttaatcctgtactgtaaggttcatgaagagttcatagcctctgctgtcactgatcaactgagcatcatgggcagtatttttttcactcattatcattaggttcaaatgtttgtttgaaccttctctttatagattaatctcatatatttactgccttacatagtcattcaaaatctgactgttattggcagaggtaatatttttctaatctctcctttcaatgattaaaattacccatagcttctagaaattaagaaatcacgattagtttttaggtaaatgtactttttgtgcaaatggataaagtgaggaatgtgtaaacacacatgaaaaaaacacataaaagaaatatattaagacttagtgttcctcctgttgggccagcactgccatttgttggggaattgtattctgatttaaaccattgccatttacatctatgtgtaacatcaaaagatgtagcatcattattattctaaatacatacaataattaatatttggataaagctaccttcatgaaacctaagaaaaactaaattaaaaagaaagaaagaaagaaaaatacacttagatagaagaaataaggtctagtgattggtagcacaatagagtgactatagttaacaataatttattgtacatttcaaaatagctagaaaagaagatttggaatgttcctaacaggaagaaatgatattcttcctaaatgaagaatgggatattccactttcctagatttgatcgttacacagcatatgtttgtataataccacatgcaccccataaatacatacaactattgtgtatcccaatattaaagatttttttgaaaaatttattcctcaagaaaaggatcatgagtttaagaaaaaacagattactagtctaccagtgtccagtagacctttctgtgttaataaaagtgttctgtatctacactatctaatatagtaactatgaaccatatgttgccattgattatttgaagtatatctggcaaagagatgaattgacttttttattttaattaatttacattgaaatagccacatgtgcctagcagctactagattggatagtgcaagtttatagagaacacaaggggtacatttgtagataggagtgggatgtcaaaatgatgaggataattagaaagcatacatgagaaatattgttttaagagtagaatatgaaatgggaacacagattaaaatagagtatgtatatatatacatatatatgtgtatatatatacatatgtatgtgtatatatatacatatatatgtgtgtgtgtgtgtatatatatatttataggccaatatatggaggtagggtatatcctagtgttaagtgagtaaagaatggattaggtgatcgagccacatgagaaggtgatattattagaaaattgaaagttgtatttgagatgatgaaaatgatatatttgaattgaaaagtaaactgtagtaaaataattcaaataaatgaatatttggggaactacttaagagaaaaatcataaaacatgaggagtcattctttccccagtccgccatgatcaggccttaggatttaattggcaatgagaaaatacctatgaaaatgctttttaaactatcacatgaaaaagcaacttattatttttcatgccttcttaataactctcaatagagatttagttgatttgcatttttgcctggttcaatcaagaaattatcgcgtgacatcaggcaagttgccaaatttctttggactatacctataaaataaaatttgaaaatattagctagatctaacccatttgtctccggatgtctgcaaagtggttggaaatcacaagcctaacctgatctgcagaggtgttacctttggcaaacttatggtttttgtgtttgttttgaaatctaaggccaagcgcggtggctcatgccggtaatctcaacactttgggaggctgaggcgggtggatcacttgaggtcaggagttcgagaccagcctggccaacatggcaaaaccccgtctctactaaaaatacagaaattagcccggtgtagtggcatacgtctgtaatcccagctatttgggaggctgaggcaggagaatcgcctgaacctgggaggctgaggctgctgcagtgagcgccactgcactccagcctgggcgacaaagccaaacactgtctcagaaaaaaaaaaaaaaaaaaggaaaagagggagaggggagggagagggagagggaatctaagccaacactgtgaaatattgtgaaatatggagcttctacctaaaaattcaaaattttaaattccttttaaaaataattggaatatctatggaatatctagcaatactaagatgaaattcctctgggttttcagtcacctgtaattgacacctttagatgttggcatgggctctcaggaagccacagcctccaccaatgcttttcttcctgacactgaagctaaatttgggtggctagttttcattgtgctgttgctttcctcatgggaaagaaataccctttgctatttatattgctgtcaaatgggaaaatgaaagacagccaaggaagatcatgtgactatttaaatacttcaagtccatttattctttattagccttgtcctgttaggcatttaaatttttgatccctgcaatagatgttttttgattaactgtatattaaaaactatatttaacctgttttgaatttgaattctaaattgtattttttcatgagagcaagtgtcatttttgattcattgtggattgtttaacatgttgcctaacaaatagctaatactaacgtcataactttttaattaataaatttgaatggataaatggccacttattggcttatagaataaataaaaacatttttattcagtcaagtgtttcatattttttatcatctccaggacattgggcttgctcaaaaccattgttaaaaaaaaaatggcaaataatccagttccatcatgatatcattaatcccacacctaagctactgaaaaaaatatattaatattctggctcattgctttatttttatggtaacacccacctggtattaataaccacagagtacgaaagaaggcaaaggttaaagcaaataatagttttgaaaaattggtagtgaaaaaagtcatgctatacggtatgtatataatagatatttaatgattatgcttgctactagtatatgtaacaggactattatagattaacaaaaatgcggtgagtatatttcttgattattttttaaaagaataaattattatttaaaaatacatgaattatttattgattcttgaatctttaccagctttctataattctaggaagcctagaagcagaattgggcaggataaactggcaaaaaatgtaaaaagtaggccgggcacggtgggctacagtgagttgtgaatgcgcagtgcacctgagtgatagatcaagatcctgtctcaaaaaaaaaaaaaaaaaaaaaaaaaaaaaaaaaaagaaagaaagaaagaaaaacaacaacaaaaacaaaagcaaagtactagggaaaactaatagacatagttacatagttaattgtgccatatgttttaaggcaatgaaacttttatcttaatattccttgcttactttttattcaaaaaccaaactgtgtataaaaccttaaaattattaggatctaaaaaataaaatctttccttaaaaatctaaaattgagatgtaaattattcaagagtgctttttaaaacagttttcttataaaggctattaggattctaccacttagccactttattatttagccactatattactaagtttacatatttttaaaggtagtgaaaatatagggaagacaaagctcaggttaaaagagtttctggcaaataaaatatatcctgatggttagactactttgctttatgttttctgaaagaaaagcagtaaaaaacagttcaggtagttttgtgtcaattaatctagaactataccaaaagtagacatagaaaacgagagattgtttttcagctttggatctgcttatggcaataagcagacttgtactattcaacaacattatgcattcttcagcttttcccagaataagggagcttcccaaatgcaatggtgcacataactcattttctggcattttgcagcccagcatgaagaagaaaaacagagctaggagttttctggaagtcaagtcaaaaacaccctgcaaattcctatggcagtcctcctttccataagctgcatagccaaaaatgtttgccagacacttttatcactgggtgtttcagtgttttcattgtttaagcgttttgctgacttgtgataattaaaattattaataatcattaaagaaagaaaaagtagaagtaaataatgttaattatctgtggttatcagtagaggtctgtatgttaccccagctttatttgacattgtttgtgatcagtaaatcacagaataaaattctgacatctaaaccttggctagaggtctctataattttatggagtctgtttcctacaatctgtatgaaagatacttcaatattttaagtttacatgcacccatcttttttagagtataattttataactatttggtttatgttgcttatgatttacatcttagagtcttttaattctgtcttttgcttaaaggaatattatggatcaaatgacctatattttaagaataccttatggtttatatattaagaaacatttatataaaattctaaagtaacttgcttgtactatttcaattgaataacttaatgtatttcattctattcttctcatagtagataataaaaagtacatcatgattattgtattcatttatacttgtggaattaattgaaaatagtttttatagttaaagtctttctttttattgttttacaggctgaagaaaaggctcattcagaggtaaaaaaaaaatatgcaatattttaatattttctattttagtttgcattcatgatgaaattagtcttgtgaccactagagggctctgtgatacaatagcagaactccacaggactgctgaagtaaggcagctaattgataaatggtctttgatattgcctcttaaaaataaaatgaaaggaagtttgtatagcaagctgtcctttcacattctagattgagtcttagctcaacacctaataagttttctataatagtaagcactcattaagtcattgataaatgaaggtctatggtcttcctattttattacagtctttttcccactccctgtaagaccatctacacaggataatggttgaaacttgggcaccaagcctccacaacacaggatactagcatctcagactatctgttttgtgtcattatcttgttgcctctaactgccattttatgtgtggtgtgtcacctattgttctaatcacatatttcacaaatacatatttggttgcactcgtgagcaaatcaaactgcattcaggaaagaatactattttaatttcccttggtaaaacatttgtcctggtcaaagagagcaggaggactttaattatgactttattcaaggtgaggtaatggctgtttgattggtttacactgaggcaatcagacaacagagaaaaaaaatgccttaacaacagcttttgcaaaagtattcctttcctttgaagtcttattttattagcctttaaaaataaaatttgtgctatgtttaaaaatatttgaaaattattgattaaaccaatttgtctttataatctctgaaccaaagagtggatatgatttttaaaaatcaaagtggttttatttacatcacatggacatgacaaagcttctaacactgatcatagtatagctactgaagcatcgaaatgctacatctatttgccttagtagtagttattcaactccccttttatcattgatgctgtatcatgagttatggtttaaaaaaacaatttcaatcactttacagtttcctggattatattttaaagatactggaatcatgtaatagagactatttaatttgagaaatgctctttgagtttggattcatttatgaataaaatagacgctgtattttctgaaatcattcatagtcattatcttataaatgtaaagcaaatgttattttagactggggtgtatctgttccggaaaaaaaaaaaaaacaggaacgaagtagaatcacatttggtgaaattatataagtgtctactgtttccagcttagagttctctactttgttagagtgtttgagttgaccaccatttattttcaacaaaatctaatgcccggggcaaaaactagacagttaataaactatgtcaagaattctctttcaaactgagacagcattccaaaagttcaactacaactatagataagatttgtttttgaagaaatgagaagcatcaaaagtagaatgtttaacatccaagtaactgaaatcccttgagactagatatatacttatagaacctagtgtcagattgttataaatgttctatccttattagtcacaacatgagacttgcagaacaaactgcagaaagtgcttgaattaaaactttaaacatgatataatatatccttacccttttctgtttcagttttattggagtgtgaacttaactaaaaagaaagataccttagaatatacattatattggtttatctaattagttgcacctatcattggttttttcccctgatttttaagatgtggataagctataaagcatctctgagctaataataactcactaaataaaggtcttgataatacagatttgggaaggcttctctgcagtcattgaaactccagccaataacaatttaaatgtgaactgattaaatgttgaattaagcccaagttttagtgattgcaggatattccatagcctttgagaagttttcaaactatgagaaattaaaatgtacagaggaaaaaaaaacctaagattttctgaaaaagaacatggagtatcttttactaaaaaagaacaagaaaaatatgtgtgtatatacagtttttataaagaaaatatttttctacagttttattaccacagtttttctagaaggagaagaatcaatacagagggtaaactgctcttgagtcatttgccatttgagggatggcaaatggagcaagtgagcgtactttgatttgtagattagagtttgacacataacactttgcttttgaatgacatttgcttgttactgtggagtcagtgttcatatcctttattttcaggagttgctgctgatacaatggggttagaatgagctaaatacagcatttgctttcttggtttgaattctgggttttaagtaaaaatctacttgcctattccattgatttttttaattgcattcagcaaatccataaactgcggagagagctggttgcatcacaagaaaaagttgctaccctcacatctcagctttcagcaaatgtaagtcacttcatttttaaaatatattacaacaaatttttatagaggaaaatgaaatcattttagtaacaaacttacaaattttcagtgcctgatacagacttagattaccaactagcaggactcataaaaagttaacattttttgcctactcagtaataaaatgtaaatccaaactgatgagaggcagcaatatggttaaaatggcttgttgtttctaataagattggaaacaatagtaacagccatatgggttacttcttttcttgtttgctatttttattactcctcttgcataagattctctgacaatgtaagaggggttgttagtgtttgactttggaagataaaatattcctgtgcccagcctccttcatctcaatgtattgaacaatttgttaagcatccagttaattctaaaatatgaaattaggtctaaatagggatagcttagctgcactgtggatgagatatggtttgctcaaaaaaccttggcagccttctcatagcaatttaaaagggtacacttttactggcaccagagcagcccaggatggcagaaatgatgacaatgaagaccgtcaattaaattaacatttactgaatatcttccactgtgtcagggagcactcagagtagatgcagaatgataaaggagaaatgtggcactgttcccagtcctgaggagcaatggtgttaagaacagcagtgaggggtaaggaaatgcctgctattttgccatatgtcttacctctctcactcaacagtcctttgctcagttctgctgcatagctttgggcctgctctgtgcctccccacccctcccgctgctcctctactgagtttttctatctcctagacaaagcatgatatgtcaagagtgagcaggtgcagacccacagtgtaagacttgaataagagccatttttaaattttttttaagctatcattgtgcaatataaattctgagtatgtgtatcatttcattcacgatgtattcattttagcactgtatttgaattgattttattttctgaaatttgggagaattaattttggatttattctatttatttttaatagatggtgttaggagattcctgaaaataatagcagtttttagataattgtttaagcaatatgagaaaataagggtattatttaaccttgttgtgtttttaaagagatagtccagaggcaaccgtaaattttataatataggctacatgtatagaagtatgaaatattgttgtctaggttcctgaatttgtacccagaggaagtagaataatgtaaatgtcagaacctcctgggttgtgtttatctgcaataagaaaggctcaatggcaaaccttatttattagattgtcaggatacttgcagatgtcttgaatgattactcagggtttcattttatttttaatgtcccttggttgagctcatcatataattcagatattggaataataaatggctgctagacatagtggaagatgggctgatactttccatttgaaatgtaatgatgcttattgtcttcaaaagaaaaaactaaaatggtatttcacatttttttgtttttgtttttgtttttttttctctgagaatctcattcttactcatgattattggtttcttgtgtaccatttcaacatttttctattatatgctaatgtgtatatatacttaatacacacgtgcaaaagcttcctcacacacacacacacacacacacacacacacacacacacatacacacacatacggaaccaaattctaacataggggaataatcttcggagtgaactctgtgctgctgtttgaaaatggagatataattttagaaaggttcctgcagttggctacccacctcgtctgctctaattatgcttgtcacactattttcactgatgtgttttcatgactttagggcatgaattctcagctgggtgttaatatgaccaacaaagggtgaaaacaggttcttgcatttttttaagtactctttttatgtgaaaagcacagatatgcagataatacataactgaacatccagcatatctgtggctttaaaatatcacgaagaagagcacaattagggaaaagaaaacatctatagtgtttccctaggggaacaatcatttaaaaaaaaataaaaataaggaacacagactagaagcagcagtgccaaatagataattcatgctagtctttgtgttaatttaaaaagtgctagtcttggagacaaacgcccaaattgctctaggttccactcagctgtatgtgttatcattagtattaacttttgcacgctgatgggagactgatatatatcctgttttatgttcctttaaacaatttataatgtaatttagaaaccttctcaaatcacattagatccacacaaaaacctgtacatagcagctttattttttaatagccaaagaaaggaaacaaccaaaaatatcccttaataggccagttaataaacaaattctgatacatctatatcatggactactactcagcaatataaagaaatgactattgatacgtgcatcaacttgggtggatcccaggggtattatgctgagtgaaaaaagacagttatagaaggtcaaattttgtataattccatttatataacattccagaaatggcaaaattaaagaaacagagaacagattagtgattgctaagggctaaggatgaaggagagagagaggtagtgtgactataggaagagggagatctttagttttgtattttgaatgagatggccatcacatgaatccacatatgtcaatctattaatgtaaatcaatattgtattcctggctttgatatataatataattttataagatatataatcattgggggaaactggatgaaggatacaagggacctccctgtactatctttgcaacttcttgtgtatataattataaaatatataatgtattaaaatgtataaaataatattttaagtatcagatactgatctttactcagtatatgaagtgttctatcataacgtaacatgcttttcctttatttgtggtattttagtttcaaactaaaatataaatcacctaaagatctacgacagttcttttgaaaaaaaatcttgcttttaatttcccaggagtttcaaccttaatcctctctttagtgtttctttatttggtagtgatagggactatcaaagcttcttaccatcaaatacatttactgactaaaaatagaaaaataatttacattgtaaaaatgtacaaattgaatgacagtcaaaaggtacaggtaatgaagatatgcattaacatctacttttaaaaaaaagtttattaaaattctcttttagactaatgcagtatctgggaatttatataaatagatatgtatataaatgactattaaacaattttaatgtcagttatattttaaacattttaataatattgttataactatgggggtaaaattttgtatatatctgaacatttttgttcttaaggaaataatcatttttacatatccaggaatttgaattactctcaagtcacctattaattacaagtcattttgaactcattcattttctttgtgtttgctttataatgtcattttagatttcatgcatcataatcagccatcaaataatttagttaatacttgatttttcctcagttgtaagaagtgctgtgtttaaatttcattcagaatgtttcatttcatctgaattaatatctgttaatgtatgtaatatacacatatttttaacatgcatgtacttaaattgattatagggacttggtaaaattacttatttataggatattttaaatataatcaaggattttttaaatctacagttcccatttgaaagtaaaagtaagtctttgtttactagtttgttcacagtacaagtaaactttctaccttttggttaaatgtgagtgcagcccccacagtgagaaattgttatattagaactctaatagctataatttatagggatgaatttcaatgagtttggttctaagaaataatctgttggttttaacaacatttttaagtatcagatattcatctttactcagtatgtgacatgtactctcatagcttacgtgcttttcctttatttggggtgttttttatatattaattggtatatcgcatatttaaacttggcataattacatttatatggactctaaacaataacttgtattttaatttttaaatttgaaatgcatctatgtctctgttaaaatgcatttctttccctttgcccaaatggggtatggtaagtcaagagagtctctagttagctcacctctcatttgactggcagagtaaagcccttgttcagtagaatgtgtgttaagccttccctcccttttgtaaagttgttctgaacagagctgcataaaaccacaggtaaagtgttaagctgattctactagcatgtccttagaaaggagagcggttatattggcaggtcctattgcctggcgtttctgatcaataactcaccaacaaacagaaaacagaagccgcacaaggaaaggcagaactaaataaatggtaatagcaaacaataagccagatagcctctggcctctcgcccacaccttaaggcagctgggtcaggtgggatgcttttgtttgtcttttaacgtattttctttacaaatctcagccattacataatttggaaatggacacaaggctagttattactaacatttttaaagacattactgaatgaatgtgtaagaaaacaaaaggtcctttttgcctttcagcagataagtcttttaaccaaaaatctcttgggtattttgagattgtgttctacttctttgcttatttaatattttcataaaatttgctagttactcttgcttttttgcatctcttctaagagaaaacaattggtgcatattattaatgagaaacacttcagtgtttggacaattttttgtagtggaaaagaaatgtgaaactttatgttgcagaatcattcttggttcaactaactactaattttaaaacataaagtcttaaatatatataaagtttatatgggtaaatatatattacatataatatatgttttatatttatacataatatactatatatttatacatgatatactaaatattttcccatataaataataaaatgctctaggcatatatgtgtgtgtgtgtatatatgtatatatatatataccttcataacatacatatataaaatactatattatatatactctaggtatacatatatgcctatatatgcacctatatatttatatattactatataatatatagtatatattactatatatactactatatattactatataatatatagtatatatatagtatatattatatagtaatatattactatataatatataaatatatgtgtgtatatatatatatgcctagagtgtttttaatttgtcagtgggctgtctctgtaatctatatgaagaaataaaatgtagacgttatgtataatgatatttcatcttgttgtgtggcatcatagtaattctctttacatatctattcagattacttttgcaccagcctaatacattgtatgattccaaaaccaaagagagtatggattgaaatgatattccctttactaatactcagtcttgtctattttattacctttatagacttcacctaacacaagtcaggggatatttatcatcatattaatacaattttactctgaccttaaaattatgcaactgctaaaggaaaaatcagaaccaaataaactgtcattaacaacccccctgaaaatccatattttttaaaagtcattttatcaagtctctcagacaagatgtgataccctataagtttaatcagttttactttccattttctcttcattaaggtgataaagattatcattagtagaaaaattttcccttatttgcctccttttccatttaccctattgagtgagaaatttagcctctcataacttctaaagtagcaatgttaatctgataaactaaaccaaggtgagataaatttaagacaatattttttttcttcaacttttaagttctggcgtacatgggcaggatatgcaggtttgttacatgggtcaacatatgccatagtgatttgctgcacagatcaactcatcgcctagatattaagcccaccatccattagctattcttcctgattctctccctcccctaactcccactgacaggccctagtgtgtgttgttccccaccatgtgcccacgtgttctcatcgttctactcccacttataagtgagaagaagtggtgtttggttttctcttcctgtgttagtttgctgaggataatggcttccagctccatccatgtccctccaaaggacatgacctcattcctttttatagctgcatagtattccatggtgtatatgtaccacattttctttatccagtttatcattggcatttgggttgatttcatgtctttgctattgtgactagtgctgcagtgaacataatgcatgcaggtatctttataatagaattatttatattcctttgggtatatacccagtaatgggattactgggtcaatttctgcttccagatctttgaggaatcatcacactgtcttccacattggttgaactaatttactctcccaccaacagtgtaaaagcattcctttttctctgaaacctctgcagcacctgttatttcttgactttaataatcaccattctgactgctgtgagatggtatctcattgtggttttgatgttacccttttttttatatgtttgttggctgcatgactgtcttcttgtaagtgtctattcatatcctgtctattcatgtctttgcccactttttaatggggaagtttgttttttacttgcgcatttgttgaagttccttgtagactctagatattagacctttgtcaaatggatagattccacaaatgttctcccattctgcagattgtctgttcactctgatgatagtttcttttgctatgctgaaggtctttaattagatcctatttgtcaacttttgcttttgttgcaattgcttttggagtttttgtcataaaatctttgcccttacctatgtcttgaataatattgcccagattttgttctagggtttttatagtttttggattttacttgtaagtctttaatccatcttgggttaatttttgtataaggtataaggaagtggtccagttttaattttctgtatatggctagtcagttctaccagcaccatttattaattgttttttcagtttccccattgcttgtttttgtcaggtttgtcgaagatcagatggttgtaggtgtttttcactaacataatcataacatacatttcattgaaaacaacacgactcaaaatgttctttagtaaccagttataagtttttttgtgcataattacaaactgccattctaatcataaacattttgtggttacttatagctagaaaatgtgagtaatatagtttatacagcatactctttacaatcccgatttctttgtcaaactttaattcatattaaattgataaagtatacacaaagggtaaaggagagtaattttcttcaagtttcacatttaaggattcatagtagaatgattaaaccttacatttctccactataaggagaattaaaatggaaatattgagtaaaatcttacatttcatttagtaagtgctaataaagggtttctgccataattttccttattttaaaagaaaacacacaattttagttttaggttttagtaaccaattttatgggcatagtgggaatatttctaacaggttaaactgaagtgaccatcatgggcatatatatatattttaaattcacatatatgaatactatacagtaaaaactaacttatgctacataccacatggatgaatctcaaaacccatgtaaagcaaaagaaaaccacaaaagaatcatgccatttgattacacttgggtggtttttaaaacaggcatatctaaacatagtgctttgaagtgtaagcttgggtaggaaaaactataaagaaaagcaagaaaataattaccacagaagttatgtagaggttatctttggggaaggaagagggaataataagagagggacaaagaagagcttcttggttcttgaaatgtcctatttcttgacttggctggtgaatgcatgaatgttcactatgtgataagtcagggggctgttttcattttgttcacttttatatatgtgtggatttttccacagttgaaaaggtaaagttcaggtgtggtggctcacacctataatcccagccaacactttgcggggccaaggtgggaagaattacttgaggctaggagttggagagtaacccaggcaacagggtgaggcactgtctctacagaaaatgaaaaaaaaaaaaaaaaagtagctgggcatgttggtacatgcctatagttcttgctacttgggaggctgaggcaagaggatcactttagcccaggagtttaagcctgcagtgaactagggttgtggcactgcactccagcctgggtggcagcaagacactgagtaaaagaataaaataaataattaaaagttaaaatataggaaaaaatgagcatagccttatgctaatttttcagttactaggtctgatatcatcacattccttgcttgtcattgaaaattttttaaactatgatacttttttttagtggtatttatccaattaaatctgctaacaaatttggtgtataaatctcaagggtaagggtatgtggagagtgggtgtgtttgtgtgagagagagagagagaagagggggaggagaaaaagaaggaagagggaaggaatggaaaaagataataaagagttgttctgatagattaatctttagtagatgtattccctacaaattgtttttctccatattgcagtgtcaggtaaagaaaggcatcccaggatgaattcagagctaggaacatgcacctttgtatcataatgctaatggaaggaacatgtacattctaactgttaccaataatggaatatatttccgttattaagtaataagctttaattctttgtatttttgtgatccatttgatagtaggtgcctcagcatttccactctgctataagtacatggagatatattttatttaagtcatcttattcatgtctttcaaaaagaaattcatttttggccaaggatttccaaattttgccccatatataggtatagtttattatagacttcgtttgcaaaatattaaatccttatatccttttagggacacaataaaattttataagtttgagataatgtacttgcagttctacctcaggccgtggtgagagattgaagtgcctcttcattttaacattttgggttcaagttgttgcataagggcatgcaaatggaaactggcctatttttgagctttaataaaatcgtcaaatacttcttaatcttaagagttatagttatgtactacaatatgtataattctctaatatttaaaacaaaacctgaaagccacaaaagcttactgtgaaataaaatgtgatggaatattatttctaactggcttacctgtatttccttcattgaagggaatatgaagtagaaaagcccttttattgaaaagagtttggaaagtaaagataactcttttcaattcaattctttgtaagtagaaaaagagtaaagataatgttctagctgtcagcagatgtctgacacttgatggagcgtatcattacaatagagcagctaacaatatctgcaaaggtcatcatgaaagtataaaaatgaggaatatttgtccattgaccatttcagtgacctctttttgggctttaagtctaaaaatcttggcagatcagaactttatattcggcattttgagtgtcaaatctctacatgatgtgcaagtcagaaggagttattacttgcaaaataccatcttctttcagaagttaaactcacattaaatgccaggagactgaaacactgattttaagaagacaaagtttagaaaagatgaatgaaaatgtgtgttaaagaagagtcaccagtcagagctaactatgatagtcatagtatttaaagagttggaacacatgaaattaagcattttgtaaaatgaaggcttttcatccatccacataagattctgacatttaaactatgtttcttccattctgttcacaggctcaccttgtagcagcttttgaaaagagcttagggaatatgactggccgattgcaaagtctaactatgacagcggaacaaaaggtatgttcagaaattgccactggagactgaaagaagacagcaaattgcataggattcttaaataatacctgaagctccttaaaaataatattccaggctgagtgcagaggctcatgcctgtaatctcaccactttgggagaccaaggtgggtggatcacttaaggtcaggagttcgagaccagcctggccaacgtggtaaaatcccatctctactaaaaacacacacaaaaaattagctgggcatggtggcgggtacctgtaatcccagctacgcaggaggctgaggcaggagaatcacttgaacccaggaggcagaggacgcagtgagccaagatcacaccactgcactccagcctgggagacagaacaaaaaaaagaataataataataaaataatattcaattctatactaaattaaaacaatgataatacctttcttttcagattttaatttaaagattttatcagtttactccatattggaacacacaaaggcaaacaaaatccttgctgggcagtctattaatttacttctggatggaactagtaaaagaatactgaatgttaagaaagagaaacagtcacataagagaatattctgggggcaaactgttatgcagttgacaagaatcacactttgataagaactttcacaaatacatggtcactaaatccagctatagggcatggctgtaggctaagacacacaggaaggatgcctgggactctgccaagtaagggacttcaggttacagcagctatgaaacaaaggccaatcctgtgtaattttgaaataacaagaactagttgccatctagggatatcacctttgaagaaaagtcatttgttatatcaaaatacttaaaatgaacctaaaggattttatggtatgaaagaaggtataccaaaaagaaaggaacggagaatttagttcacgaagacaaatgtattaaaaaggtccatactgcatagaaagcctggtcacctttcctgtgatgaccagttagcttacttctctgctgttagtccagtggccttaacttccttggataggtatcagagataggtgaaacctatagaattctatggagtgtgtgtgtgtgtgtgtgtgcgtgcgtgtgtgtgtgtgtgtgtgtatgaaaactgtaaatgtgcataaatgatcaggtgtccagagctttcatctaattctcaaagagacccattatatcaaaagttttgggtattttcaagaatgcgttcctctatctatccataggaatggcttcagttttgtctttagattctgtaagttatgtgattagctttacaaaagtagtatgtattaccaaattttgtcactttacaaaagtttatttttaaaacagaatgaatagttcaatgaaatcaaaagagtaaatcgaatattcttataattgccaagtattattagcacattgtattctctctcatattctccgtataccctgcccgtgagagagaatattatccattcctggaaaatctgttctagcacagctaacaaactccttttgaaacataaattttcctttctttcctccctccctccctccttccctcccttccttcctttttccttttctttccttccttcctgcctcttttctatccttcctttctcctcccttacaccctttcttccttcttttccccctctgtctccctctctttcttttttgctgcagcttgtcacttcactatgtaatataagaacccagcaaatagaattagaaggctttttagagcagctgacgggaaagaataaaaacactgggccccagtattcttgaatgagaattctggctatgtctgttaaaagctgggtaatcttgagcaagtttatctaacctttcttgaacctcaaattcaccttcttaaaagtggggatgataatgactaccttgtaggatcaccatgaggagtaaatcagatactgttatcatgtcacatgctaggggctaccaaaaaatattaccttcctttacatttctctttttcccttgaaaattataagataacaccaaattcctcactgggcatataccaagcatattgttggaaatgagtgttagaatttaagtctcaatatctttaataagtcaaaattaatagaatttttgtcctccacccaatattttcttgaactctgttatatctgtaagtgaattttctcatagaaacatacagagaattttctcatatacatatagaaaaaaatgtagaggtatgttaatgtataatgcctatgattaatgcctgaatatttaaaaataatttctataacataagagattttataatgtgtctacattatccttaaaataacattgccaaaattataaaattttctcagaagatatcagaatgtctcatattgtccttatcacttttttaactgaaaataaaatcacttctttttgaattgcaaactgtatacacacaacaatcatggttaactagtttattaatttgagattataacttgcctattctcaaagtgatatttaaaagcctataaaattatttgcaatgtgaaatggtataattcaaagacagaatctaattaaaaccagtagaataatgtatataacaatatacctcagcctagataattactactgcaaggcactgaaatgaattgaatttcaaggaagctatagtacaaagggagattgttaggtgtgttttattctcattttctgaccaggagagcataatttagactgaggagaaaactctttggcactaaattcaaggacgaatttattgccaaggtttttaaattggggtcatggaataacaaaagacaaaatcactgttcaaatagacatttctctaaaagctaagggcataacatttaatcatatttcactaaaggcatttcttcagggagctgagataaaagggtatattgctctctggtgattcaacaatcctgagaaaaggcttgtgaagtatagagcagagattcttaaactcccttccccaagttataagtttcatttgtctatttagtcattcatcaagtttatattgaatttgtgctcttctaatgacaaaacagtacagacaatatagatatagaatgatagatataggtctatatctatagacatacctatctactagaactctaaaagcatattatacatgtatgtaatattcctcatggagtttatatttctcatatatatctcatatatatgtatctctttatcatggagtttatattttaggaggtcacagatgataataaaaatataattaaaacaggccaggtgtggtgactcacacgtgtaatcctagcactttgaaaggccaaggcaggtggactccctgagatcaggagttcaagaccagcctggccaacatagtgaaaccccatctctactagaaacaaaaattagccaggcctggtggtgggcacctgtagtcccagctattcaggaggttgaggcaggagaatcacttgaacctgggaggtggaggttgcagtaagccgaggtcatgccactgcactccagcctgggcaacagagcaagactctgtctcaaaaaaaaatatatatatataatatatataatatatatataaatatatatattatataatatatatataaattacatatttataaatatgtaatttatatatataatatataattaaaacatataggatttcaggtgatgataagcactactgaaaaaagtaaagctgagaatgaggatactgagaagctggtttggaagctaaaacacaaagtaacaaaggccaaggtggttacatgttcttgattacatactttaaaaatggataaactaaattaagactcagattctagtctttgggcttcacagtgtgattttcagcaatcacatggcattaatagcctgaaactacatcaaaattgtcatttgatttatagaccaaaataactcccttgaatagagagggattcactcctaacacttttcctatttccagatgccaaataacacggaatctcttgccaaatttgtgtggcagaacactggttttatatacttatagcctggtaagaaagaaaagacatgtatgaataacttagaaggcagaaaattatcatgctattagactcagtacaatgtcatgtgcattctcaaaggaaacatctgcagaggcaggagaattgcttgaaccctggaggtgaaggttgcactgagctgagatcatgccactgcactccagcctgggtgacagagagagactgcatctcaaaaaaataaaaattacaaaaataaaaaataaaaaatagtgatcaatctggcagcattttctgaaagttaagcagtattcccaatagctgctaaaagaagacatgttatataatactaagtctgtaagtaggtaaaaattaagagaattgttaatgtgcttgctggggagtgaaattatctctaggcattaccctatacctaacctaggactcagtagactatgatattggcgtagtttgaccaagaattttatcctgatttcagatcgttttctcttcaccagcacttcttcaccaggattatatgaaaaaaattaaacctgatgccctgaggcatccattatatgtgctgaaataacttcttttctcaccatctagaatggtactagctatgtaccactcttgtcagaatcaaggaaattgctactcaaatcattgtgcagcttaattttctcacagaaggccagttgagaaaggctcaacttctaggaatccagcaaactatattttttataagtaacatttttacagaactacttctaaatccttgtgttcaaatttactaaagctatattcacagctaaatatttcagaatttaaaatttaaaagactttcaaattagttccctgtagctgtcatgccaaggcaattagaacatatgttaaggtatgaggggtttttcttgttagaaggtcagagcagggcagagaagtagccccttgtatgagtgatgaagctcagatattgactcctatgctaaccataaagcctagtagtttgctcatttgttacctctctgaaacatttttttgggtgactacaaaacaggaattgaaaccttcaaaataagggaatttgaaaccaaatctttgaaaatagataatgctgcaactaaaaatttagttgaataggatttttacattaactctccctaatttacgttatgatatttgccatctagaagtgtttttaaaaaatatattgctggagtcagatgatgcatccattaatctttggggcatagaataatgtgaatctaaaattttcaaattatttacactactggtatttggtcaatgtaatttatttgaaactagatgcaatagggatggccaggttatttcagtagaacaactagcaagacttcagatgcatggtggagtggggaaaggaggacctgtttaaggaaactagagctgggaagtgtgagattaacttagtgccaatgtgaggacctaaaaagcagatgtggtggaaaatttaaacaggcttgcctagaaggtcaagttagttgatgacacttgatgagattgtcccaagctttgggattctcaacaaagtctttgttagtgagaaatttggaaagagatcaggtatagttaagaaactgggttggaaaggccaccaggaaaggcgaatattctgacacaaaatttgatcattttatttggaagcatttcaagcctgacctgaacgaattgtttagcctcagatacatgcataaaactgtgaaaagagacattgactcaatttagcttctttaacatgagaaactttcgtggaaaactagaactttacaagctcagctggtgttgggggcatcattatcttgaatagctcactggaggaaaatgaaatcttagtttggttctcaggttttaaaatatctatcatttttgaaaagtgtgaagtaacaaaatatgatctgattatcttattcctaaaatcctttgcagaattatcccagcctcaatcttctctttagtatttaatgagaataagaaactggaaatgactgaattggaagagtagactttaaatccatatcttgatggcatatacatttttcagttttttttctaaatgattaatgaggattctcaaaacttgagtatcttctatgtttcccttcaacataaagaaattgtatgaaaatattttaaaaatttctaatgattttatagttagctatcttgggaattcatttctaatcatgtacctcatccaaactccccactatggacaaaaataaaataaaaattattagttgcatctgaaggccacattacaatttctatgcattatagaaacctgagaaaatgtatcttaaaaaataaatgtgaacaactaaccataattatgaagaagaaaaatgaaaactagaaataaactattgaaaaatgtctatgtatcagttaagtttttattttaaaattctttatgtttatctctataatactattgggaaagagagaaaggaaaacctgactttgttctcatccaaaggaggtgattccactgatttagccaaaataagacttcctggttataataaataataaagtttttgatgttttttatatggtaccccactcactaggtgatcagacaccctcctgcaaaaaaaaaaaatacgtatgcaataaagttaaagttttatgttattctttcaaggggagaaacatctgtttaacacagaccagaatatttcaacaaagtcatcccaatatttatggagatcataaatcaagcgaaaaaatatattcatcaacaactaaacaaactacattaaatagtctcaaagcacattttcactttttttctgacaggaaaacaggtttcacaagtgtggagacattttaccatggcttttaacagtgaggaaggatgtttaaataaagggaaaaattatatggaaagctcagagaaaagagatgggtgtggcttgagtgacaaggtgagagcagatctcattaactgaaatgagagagaaggaaggaattttgcaaatatggaaagataactagtgcaagtttgaacagattatgtcaatcaatgtagaatttggctatctttttaatcaaagactatggaatattttataggtgtttgcttatactcaaagttttaaagaaataacagtatgaatttggttgaactaatttttttcatagataggattctcccaagttatatagcatatatatttcttaactagttattcttccttttacatatattgtgccacattgagtaacaactaacctgctaatagctattggtttttaaaagataattaatattagaaagtgatcatttttctgtttcatattaaacatgatattctgaaaaagcaacattgcctgaatgttctacattttatctttttgaaaacaggttttataagagatttcttgtgaaaagctgaacgttctgacactgaaataagtcagctaactcaaagctaagcttaattttttgacactgttggcatgaggtctcattcccaattttttcatttaaagccacaggcaaatgttttaacagattttaatccgtagtacaagcattattgatcttaaatttaaggataaaaacctgattttaattagaatttaatatgcattctagtatttacgttgtataattaatatttacattccatgattccactatgtaccatttatttctttttgaataaatttccagtaggagcagaataaattttcagtgaatattttatttcttgggggatatttttaaatggaaaatatattaagtttcggtaaaatctgttgctaatttggcagtggacagaatataaaaattggagagactgagtcattatgatgaattgggtctgacttttgtcatgacactggaaatttcccacaaatattatattcttcttttataataaatatagtcgaaatgaattgcagtcaagtatttgaagacccatctataaatttaggcggttactgttgatttttcattatgagagattcttccactcataagctactaaaagtacataaagaaggtctggttgtttgttttaaatgtgactgttctctatcaggaaaatgtcaggtatccgatgaaaatagatatatgaggtgccaggtatctattccaaacttggatatcacttcaattagcatcatctttttttttttttaaagtgtctaaggttagaatagtcaccagatattcccatgtatgaagcaattttctgcaaaggccgctgtggatgatctttttaaaatatatattctgggagacattgagtaaagagaaattatttaccagagaatgaagaaccgaggcccgattctttggctttctgccaaagatgctgaaggcagtgatgaatgacaaatacattaccaaggaattctccctctaagaggctgacaaagatctgatttttaggattatattaccaccaagaagataccccttgtcactgagcttctaatggaaatatggtctatactgaaacaattctcagttctttttctttctatctttttttgagttattttatcttccaaaaatgagttatttctgataaaataattcacttaaataattatgaaagttcaaatttgtgcaaatatttttattgggacatcttaaaattactctaaattcaaaaagaaaatatatgctttattaaaatttgatctgtaagctgctttgtttgtaatttaactattatataaaaattgtataatacatatattttatttactttattcctgtgttgctttggcttggtgagactaggtctccacattaggagttttactgaatgaaaaagtatcagaatgtaacatgactttgatatggcatcagaatttaataagatgacatttaataggaattaggggtaagttccaggttttacacttaaatacaaataatcaattttgcaggcacaaaatacttcaaacaaaatctgaaatcattcatttgacaaaacttcaggtttgcagttgacaataaatacaatacaatgcaacagtgcaatagtgatatctaaatatctaatgtaatcataggtaatattagtaagtgtgttatctgaaatgagtggtgtgatatcctgctttactttgtactggtgagttctgggtgccacctttgaaaggaataaagactattcatatctcttttataagacaataagaaaaacaaacaaacaaacaaacaaaaaaccacctcctttactttagctgagaaagaagttattaggtacagcttgacaagttcagctaagcatccaaatcttccaggaggttgttactacataaaatcaaacctttttaattcaactatgagcagggagattttatttttctttcgggtactaaagcttccaaactctgtttattccacaggaatctgaacttatagaactaagagaaaccattgaaatgctgaaggctcagaattctgctgcccaggcggctattcagggagcactgaatggtccagaccatcctcccaaaggtatatttagaaatcatttcatttccacccaatataatagacatctattttatttattaattacagtagaactgcatttactcagtgtcactgtgcattattaatacatactagttgtattaatagttgtattaatacatactagtagtattaatacatactacgttggtattaatgtgatcagaatcctagaattttagaacagtgacttccattatcagataatttttaaactgatcttaagaaatttggttctatagttgtatacacatctctctacttgattcagtggagatggagatggagtggttggttaatacatgcatatctgacttcaggcaaaacaaacccattaatgagtatgataatctagatctgtatttaaaaatgaaatagtcaatatgatgatatagtaagcagtgggcattgggaacaacttttcctggatggaggctataaaaaggtacatttcctgtagataattttgaaacaataaaaacaacgggtgaaaggtagctctgttttaaattattcctatgcttaagcaattctaaacaatgaaaggggtatttctgccactgcccctacccctgggttcaccactgaagaaatgctcattattaatatcgtgtcatttttttcctttacattggttctatttactcatttcctgacacttttcaatggccttcagtgagctcagctctttcccagcttaaaaaatcctgtcctaaaacatgaatgccttattatctctcttttcatttccagaagaattctgagaaaaattttatgaagtctttcaatgtcttcagccatctttagaccactggagtgtagctccttttccctccactccaccaaaacaatgctctccaggatcagcagaaacttacatgacactaaattcagtaaaacgtttataattcttattgtattagacagacatggaaacagcatttgatgctgatattcatttcttcctatgtgaaacatccggtttttctaatgttcgtgacatcatacattcttggtttttcttctgttcctttgaaatattttttcaatatttcttttgtaaattcactcttttgtatccatttgttaattgttgatatcctaagctctcttccattatgattctatgcatcctatttaaaatatatagaaaatcatctcatactctagctgtaatttttattaatgtgctaatagctaataactgtcaaatctaggtctccaggccaggctctgtatatccagctaccaagagagaactccacgtggatatctttggatgtctgttttgcatcttaaacctaacttctccaaatttgcacttgtcttctgtctcagacctgctgctccttcagtgctctttgcctcagtagatagcaccaccatccttccatttagccagaaatctaagtattcttcataactcctcctctcctcattgaataaattaccaagatccgttgatcccattccttaaatatctcttggatctgttaacttttctctgattttactcttgccatccatcacctctctcctgaaccatgaccacaaacccctaaatagccttcctcttcttaatcttatcctgctttacaccagtcttcacgctgaagccagaatagtcattaagaaacacatctacaggtatcccattcattgcctttagaatggaatacagactcctcagcatgacataatctctcttcaccagcttcatttattcaacaaatatttattcataaccaattaagtgccagatgatgcacatatagacttcttgttctgttgttgcattgcatattccatatttcagctatcctgaattgttttcaattattcataagttctttatgaattgtgttcattccatttggaatattctaccttgtttgatcagcataaagacttttcgagacactgcagcagcagtgaacctaaatatgtttccttgacccctacattgaatgacaccccctgtgatatgtttctggaagcagcaatacttcccttcttaaaattacattatactttggggcttttatttaaggtatgtctttcctgatttacaatagtagagcttgttttttcacccttttgaaagacatcaagatgcccatgatgatgtcttgcatgtaacaggggtttatttgaatttttaaaagaagaataaagtaatttttaaatgaatttcaatttaaattttaggaaaacaattatataaagtgagatatgcttaaattgaaggacaaagtagttctgtaggggctacttctttcaagactttagcaactttccatgtgggggagtgatttatgtgatgcatggaaaattactgcatatttaaagcttatcttagagctataataaagcagcttatgttctaaatcttcatgtcgtaaataggtccagaagggatttaaaaagccttaatccttactttaacacagcacaagtcactgaagtgaaacttgctgaaaggattccttttatgttaggcaacaggtagctgaatatatctacagaaattgaaaaattggaattcttttgctcagaaatgtgggaggggtggagcttaaggtaaaaaataacagttaatatctaaattgatcaagaaatatgaaaaaataatttgctaggttttaaaactaacaaaaaccatggttataaaggtttgaatatatataggatagttagattgtatttctgtaatattaaaactcagcattaaatttaatgaacacaaagtgattcttatcacattgaccattgacattacatggaaaaaatagtcagttggactaattatgtgtctttccatgggttattaaggtaattgtatggcatataaatttatactggaaatcacattgaaattcacttttagaggcccttaaaatatttctgtaatatatatttttaacatatgatcttaaaagatatatttggaatgacacaacagttttatagacaggcctgactatcacacaaccacacaccaatttgtgaatgtgtttctatttcctctaaattaatgcatcacattcattaacaaagtttgataaatgactatagtctataataaaatatttttgtttacaaacatatttaaacacctgctattaagtataggcattatcagatcttaaaatacaaagatttaaaaaattaccctgtggtcatggagctcacaatccactgcaaaaataatgtttgtgataagaaatttgaaagttgaaggtaatagaaaattttacctttatttttcaaaatgtaccattgctttctaagtcactacttctgtgtaaatatggaattgtttttccttaagatataccaaatatagttggataacgcatgtattaaaattctgtcagcactaagttgttttttagacatagtgataggcaaacatagttatattgaatgaaaaattagaatcaaatttattaaacactgtgtactgattgataccacatgccatatgcttgtatagcaatacaaggtttggaatttataatggtaaacaaaatagatacggtctttgtctccatagaacttttagtctagtgggagagcagaaggtaaaggaatgtatgtgatcattggtgaagctgaacatgtatacccaaacagttataagttccaagatggacaataatgggtgccatagggaaggagggtaccaaggaacctactggaggttacatagggaagattattccaaggtagtaatatttaagtgaatatccaaggaataattgtcaatcactttataagtactgagggaggagtatttcaaaagagctttgaggcggaaaataaattagttcctttatggaactaatgtaaggaaaatactaagcaaacatgtaataagaagaacacggttgatgagttaagaactgacaagattactgaaggattgtaggccatatttagaagttggattttttatctattcttattaaagtgagaagttattgaaaggtcttaagtgggggagtgatgatgaagtttgccttttaaaaaagatttttctagctattgtttatagaatggtttgaagatgaataagtccaatagctatacttgctgtaaagtttatgttggtagcttgaactggggcagtggtgacacagaggatgggagatggaaaatgacgagtgaacaaacacatacctgaaaatttaagtttaaaaatagacctctccattaattcagattgctgatattcattcggttagccattctttactgaactttatgatgccccatatactgaattaaatacttacaagcactaaaaaagaaattgttagggaacagtaaaatgcatttccttcatttcacaatattattaatattatggctttgctaatctttattggtgaatgcagtcataattgaaggtaactgatacttccaaggactacttttgacctaggattactatctttttaaaaatttagtattaaagaagtcaaacacaatttattaattctggatataataaaaattctgaaatactttaatactttgtgcttttctatttgtgaaagttaattattaggaacgagctagcaaatgctacttctttttcaaaaagctaatggccaatcacagcaaaaatttaaagcactaagaaatacctacacatattcttctattgcccatttatatgacttccataatagttgattaaaggataccggattcctttattgttgaattaaaacctcctacatgaaaaccttgatttaggtttagaagttggtaatgttttggcatgcaaaaccagttaatgttctcatcattactttttaaaacaatgttaagagatgaattctagggattataaaaaaaaaaaagctgtatgtgtttcttcctataaaatttttcagcatgattgcctcagtagaaaaattaagggacttattgatatatatgtatatgaaggtgaggatacacatatacacacacacatatatatgtaggtaaatacatatattacatgtctatcaatccatacatactcatttattatacgttttgaaagcaaccagttatagttttgttgccatggatcatttttactattcagtaaatcagtcaattgaagaggcttgattttatggtattagttttttggaaactgtcagctttatagtaaattttgacatcttacaacttccactgagatttttttgcttgactaatctgccttgatgccaataagtatattaacggaaatggactaaaagcaaatgtgacttgaagcacaattttgtaaattttcttagtgtctcagtaatacttaatactagtgcattttaggtaggaaaattttcagtttgttttattttaaataactataaatcttatagttgcttgtataaaagaaacagatacctttaacatgattaaatatcaaatgctattctcttcaaaatatcttaactaaagaagcactgcctgctcttagaagttaagcaaggccataccatatgctgcgtacatggcttttaacacaatggatattagaaacagcctaaggctgagactggctccactatttttcagctatgtgaccatgtgaaagttacatttagtaattaaactcatttcagtagtttgctttaagaataaaattaggtactccgggggcatatcaagcatattgtaaaacctagtttgattattatttgttattggtattactattactattctataataagtcatgggcaggcagtaggggtacattggaagaattgcactgtcttaaatatgtcctctgtttaactcacaaactcagtctacctaggctttctttggaggatctgcctttcattggctgtttgactttggccaagttacttaacttcttttcacttcagtttcctcatctgtgagattatgtgcttacatgacttcaggttttgttttggctctaatatggtatgattctatgaaatggaaagttaatacatttggctctagtaactgtatttgaagcacaaatattaaaaagcacaattaattctcattctgagtttccatttactcttttaaattaatcattcagaataaatcattttggaagagctgcttgatccaggtattcagtagaaatcactagcatagcatttaattttagacaaaactgagaactcattaaactgccagggctatggacttatatgagattctcattaaatcttaatgtagataactcagttaattaaaacaaatatggttgtactttattaaacttctaaagtcaaaactgcattgaaattatctgtacaaagccttgttgacctttattagagaactgcctctcaaaagacctaaaagacttatttgttcagatcgagactcttcatgagccgatgtgatactctccctctattgctagatcttcgcatcagaagacagcattcctctgaaagtgtttctagtatcaacagtgccacaagccattccagtattggcagtggtaatgatgccgactccaagaagaagaaaaagaaaaactgggtaagttaccatccttcatctaattcagaagcttattaatgcataatgtgttaggcctttttctttggggctttagtgatctgcagtagtttacaaagggtcccattcaagctactgagacctcaaatgctgcactcatcaccaaaattggagtggcatgtactgaaaagcatacattttaatgttgggactaaacttgggtttgaatcaccactatatctagaccttttgaggggcctgaattttctaaccaataaaaagacagttaatagcaactatatttatttgtgaatatcatttattcacagatgttatctaatttttctatagtataactatacaaactatgtagtataactatagagttatactaaagaaaaataagataacatctgtgaataaatggcttaaaataggggtttattgtgggcatagagatgaaggaaaagtgaaaaaatgatgatgatggtgatgatgatggtgatagtggtcttggaggaaaaggagaatgggagttaataaagggaaagaataaacaatgaaactctcattccacctttggaatcgacagggcttaccgtgtgaatagtttcaccctaaaagaaatcaaccacattagtgtctgcttgatgtttttaaccaagagaatatagcagaaatatagaaatgcactttaacagaactgtaccttaagtttgctagtgatataatttatgatattgatcaatagctaaatagcccaggggaagatactgttactgcgaaaaatttaaaaacaatggagtcaatgatttcttttaataccaaaaaaaaaatgtagattttgagtaaatacaactcttgatgaaatccagacataattatcagaggattttactggagtgctttctacaaataatgaaagaaatatctttttatcttaaaaaatgtttatacaggtaatattttaaaatactgatcagccttcattcccttgatttgtaattccacactctttcatgtttctgcaaggtgaactctagaggaagtgaggtgaatataaaccgtggacaatttggcatgcatctataaaaaaaccctaccttggcatgaatgctatccattttggcagtaggcttttataccttttaaaacagattaccttgtatgtcttttctttgtgtcttttcattttaatctcaaattttaaagagatgtaaaaccactttctgaatagagctgtaggggataccaattctggttttgagtagtctggggttggaaaatttgaatagaaaaatcacaattaatgaagtgttaggtgaatttgatttcattttgctttttaagtttgtactgtcagcaggacatgacttgattgtagcgctaaagtggccatttaaaacaaattgccttgaagagagaagcattgggaatggagatcccttcaaggtacttagttttaaatgagtgctctgacagccatgcccttgaccttgcactatttaaaagccttccatgtttgcgctgcgctggattaatacaagaataaaatgaacacacaaaacacggtatcattttttttttagagatactgtgctgcaattgttaatactctgcttgtacatactgaccccaggcagtggctaggatggcatctgcaaactaacgccccaaagcaaaagctctccaagtgcaaatagacaagaagggtaatttctgtccttgtttcagctgagaagttctttcaaacaagcctttgggaagaaaaagtccaccaagcctccttcatcacattctgacattgaagagcttactgattcatcccttccggcatcccccaagttaccccataatgctggtgactgtggctcagcatccatgaagccctcacaatctgcttcagcgtaagttgctccttctgcaaaatgcagacatattttttaaaaacaattttagatgaaggccttatttatgttctaaccatatctgtaccaattattttcagatttttctgagaatgatggacagcattagtttctcttttcatatttctctttcactggtttctttcattttcatttttctttttcattttcatatgttagaattcaagtgtttcttgatctcattctccagttttctgaatcatgattctcacttcttttcatgggcatttgtccatgtatctgtctaactgtatgtacatacaggtcaccccttgtctggccaccaaagaaacgacaaaatggccctgtgatctacaagcatagatctcggtaaagtggagtgcgatgcatgaatactgcaaagatccaggttctaacctaagtagtgtttgcttttgctttttctaaaatcactcacatgcatttcaacaataaataccttctctttctgttttttcaactaaaatttggtttcctaaaatcaacctgcaatccagttttctttgattctattagttaatctaacctagcatttttatgatagcccactttttggtagtacagtagccccccgttatccaccaggggtactttccaagacccccagtggatgcctgaaaccatagatagcaccaagccctatgtatattatgttttttttttctatacatgcatacctacatatgataaaatttaatttaaaaattaggcacaataagtgattaacagcaataatagaacaattacaacaatattttctgataatagttatattaatgtggtctctatcttcctcaaaatagtgtttttttttttttttttgaaacaaagtctcactctgtcacccaagctcgagtgcgatgtcaagatctcggttcactgcaacctctgcctcatgggttcaagcgattctcctgtctcaacctcctgagtagctgggtttacaggcgtgcaccaccacacctggctaattttttgtatttttagtaaagatggggtttcaccatgttggccaggctggtctcgaactcctgacctcaagtgattcacccacctcggcctcccaaagtactgggattacaggtgcgagccaccccacctggcccaaaatactgtaatatttttggaccatgtttgactgtaggtaacttaaaccacagaaactaaaattgtggataaactataattgtgggggactactgtacaagaacgaacacatttcgaatatagaaaagtgttctggtgagataattctctgtgttatttactatttaaatctaatttccttgtatgcccatgacaacaactagcatagaactcatatagaacagggccactgtgctttgcctacataattttatcatttatgcagaaaggaagaacatgtcactgtcattttgtggccagtaaactagttgtcaaattttaaatggaaaatatgttagttaatataaaacaatttttttggcaaatttcctgcgaagctgtccacaaaacaataaaaacacaacaaggatacaatgtgtttccttcaaacagccctcagctagcctgctaacaggggctgaaacctttgatttagctgtgatctcctaaatcagctgagcccagtagggaggttatataactcacccattatttaaatgtccaaaagtaatatctctaatttattttctacaatgtttatattggatttttatggtaattaaagacagtattgtggcaaagctttttttttgcacaattttacaaaagaagaaatcaacattttaagaatgtaataactgctcttataaaagaatagtcacatgttgcaaatagaggtttaagtcccttgaaaatgttggaatgaaatgtagtaatctatgacttttctgcctataaatatcaccaataaaagaatttttaggattactttatattcagtaagagtagactatttttaaactttaaaaaatagaaaaaaagattaaaagaaaaagctacttccgttttgaacctgtgaatgcataaccgtttgtaaaactccttctccttttctctaggttttgccagcagcacaccatatctgtacctgctggagaatattgcagtgcagcctttaaaagaggcagtgcttttcttaatcctctggcttccccaggccactgattctgtttgtttccttcttcaggatctgtgaatgcacagaagctgaggcagagataattctgcagctgaagagcgagctcagagaaaaggaattaaaattaacggatattcggctggaggccctcagctctgctcatcatcttgatcagatccgggaagccatgaaccggatgcaggttggtactgaagcactttcaaggaataaaatggagaaacaaaaaaatgctgcttattctgttctcttggttaacacagaataaattccacttggaaacccaccttagaaatgtactctgtttattcagtctttgcaactcatctgttagtactgaattgagaattttgtcaaatccaagtttggaagtgggagtgcaaactggcaagttgtattcaagaaccattcaggatactgtactagtaattggattcaggttgagagctaagcttttagagaagctactacaattcttgcttcttcacttttccatcatttacttttattttggctttttgcctgttcttttgaaatctgattttcacatactttcaccagttttctactgaaatacaaaagtaatgaggaaactatagaaattcaacacaagctttctgaatacagaagtaaaagtgatttagaatgccatctgtaaaagtaaggcttgtgtatttttttgaaaaacatctaaaggctaaattcagaaccagtctgtgctcagactaagttttcattttattattgtataccagtaatcacttggtaccacagatgactgcaataagaaaagctcattgctgagcagattcatctgccactgtatatgttcatctaaagacttttgttgtttttttatgagcttagtgtcccgattggaaggaaaaaaagaaactttttcagatgttagatatgattttggagtaattttaaatcaccttattgacattatttttgttttgctctgtctttcaactgtctacagatttataacaatattacaaatggcattatatgcttataagattttaacatcacctttaaaatgagaagtgttatgaatgatttcatcatatttttcttaattcaaatgagaccaagtcctcatgatttagttaaaaaataatgataagcatgtcgaatggttggattgtctatatttgtgaattcaggaatgtataatgtgtgagagagaaaaaggttaaatttccttcttgggaaggaaatcctatttcatatcttatatttctttatttaacatattaacatgttttatttaacaaacaagctaattaactctgataaaagacttggtgctattttctcaatcaaaccaactcagtttttttcatgttttccatcttcataacagaatgaaattgaaatactgaaagctgaaaatgaccggttgaaggcagaaactggtaacacagctaagcctactcggccaccgtcagaatcctcaagcagcacctcctcttcatcttccaggcagtcattaggactttctctaaacaatttgaacatcacagaggctgttagctcaggtgatttagtgcacatgcttgcctgaatcacagcatacccatgagttaacgggtgggaagcctggaatttggagaactttacgtactcttaaaaatgttacactctaattctcagaaatagtcctagtttgatcttataaatctagtctacttagttataattttaaaagcacattctctgtccaaaagtcagtcttagagatatggtcttcataatatttttaagaaatcacttttccctaggaagtactttctccatgattctgatgatgaagaaatactctcagtgatgataattagtacttatggatataataataaccccaatgacttttattaagtgtgcaaaacccatttataagtgtagcaggctttattttctaaatctgacttgatgaacctgtgtgatgctgctctgagaaaacaataatgctactgtcacccagtctgcagctctattaaatttccaacaaagataaagaacacagtactagtgatggaacaagggtacagttttgatttgattgcaaatagaatcatatgacataatgtcatcttaatatctcatgaaccattcaagcataaagtgtagctgtttctgtggaacagttcattcaagagaatcatttcaaggatagagaatttagtctatataatatttacatgaggatctatggtaattgtgaagcacggccaccagatgacgcttggaaaccaataatatgtatgttcctagccaacgttagattccattatagaatggagatagtacactgcttgccttaaatcatattaaaatacagaaggagaaggagaagggaaatgacatggcatgctgatattgattacatttccaatgaatcacatctcttctaaaaagacagaatgttaaaaattctgctattatggctgctcttcataatataaaataatggccttcatcttatatgtaaaagacaagtgggcactccctgtaatttaagaaaacaacttttgtaaacttctggtggggattagagaaagaaaataaattctgagaataagcatcaagtacaactaatgtcagaagccaagtaaaaagcaagagatttcagaattaaatgaacttatagatcattaggtaaaataagactgtggaagtggatggtaatttgagtttgtaaattacacataaagtattatccacactcaacaaaatattctgcaaaagaaagaacgcaaatgtttaaatgtatagaatctggcagttctgaacaacatcctctatgttggcttgttgctgatggacctgacagagaagtgaagtaagatctacatctcataatgaccagtgcatttctggatcctcaggcttgtctcctaggaaaagacaaaggccagtaccttataggtcagactaatggtagggtttcactgccttttataaaattctgttttattttatgaaaatatgataaggtttgaaggaggcaagtttaatactgaaggtggtttagaaaaaacagacacatataaaaaaaacttagtatctaggaaaaatagaactcataaagataaatataaaatcaaagagtttaaatttacaatttctatgtttattggtcttaacacattgatggccatgattaagaatttaaggcaattttttaggaggagccaagttttacgtttttttaatacctttttttacccattccctaagttatttttaatatatcttatttccttaattatttttcaatagtgatacttatgtctgaactaaaaaaattaaatcacacaaccagaatattgttttcattactttcactcttgtggagtgggttcaacacttggaaatcaaaactgcctttatgctggggctttttaacagacagactttctaagtttcatgattaatcttaagataaagaaagtaggcaggagagaggataattggcaaatatctagttcctgaaatattaattgcatgttccttgcatccagtaaagacagacatttcagaagtcttcagtttttggccagaattttactcaattatagccagaatggcagacctctttaatttttccttcaaaatatagacagaggaccatgacttattttctagtaaaaaacaaaacaaaacaaaaacaaacaaacaaaaatacagaaggctctcacattaatcttgctgtttttcctggagttgtttcatcaggtgaccatcctgtcaatattctctgaactggggagattcggagtcatgatgtgagccacccacagtcaacagaaggagttagaataaacacaaataatggctggaagagcaaaacttagtaaacactgaggatgaagtgctttaaaagtattatcttttatgttctcaataactctaccaggaaggtgctgttaaagccccattttatagctgaggaagccaagacttaggaaagtgactgtaacaatttgttcaagatcatgaaactagtaagcagcagaactaataatcaaaccctggcttggatgaatccaggacctggacttttcactattgtgttaattttgctttaaatagccacataataaaagcaaagaatagttattcactcatctttggtaaatatttatcctactgttgtcaggagaaatttcatattgtaagtgtagtttttagaagtaaatatggcatgaaatgaataacatattccaaggcaaatttaagcagcttatgtggatcaacaatcaggccaacctcctttgctatggactacttggccatgtgtgatttggtccatacttatttccatccacatcatttcatactactcctcaccctccccttgtctctacattcctgctaccctaaacatctctgtgttcctttaacatacccagcttacacatctcagggttttgcactgtttttgttgactgaatctttttcccttgttcttcacttatctagcattcctcagccttctggtcttatctccaaataccacttcttcaaggaagccttccaggatgacctatctatctagagcaggctcccttcagttactttctgtttcattgtttggtttatattagcagagtgcttaaactattctgaaatacatactccaaaaaaacaaggaattcactttctttctcatcttggtattcattcccaatatgcagcaaaatttctgataccatttatacctaataaatattggtcaaatatttttgagcatttatgagtaattaagacaagtactaaagtaatttgatcacaaactaccagaagtctagatgtgaatagccaatggtaaaccactctaaacttcttaaaaaggagcaagataattaaaatgacacttaaggaagagttttatttttgagtggagtaggtgaaaaggtgaaagactattaagatgttaacttgggaaaataattaaactccagtgcaggagattatctttgatgatttaaaaatttattgcaaagctctaaaagttctaaaagttctcaagctctgaaagttgtttttaattgttatgatcttagagtatttttattgcttactttcaaaattacatatacttaattattaagataatagaaaccattctatttttggaggccatcttattagagtgttgatttctatgatgctatagtcgtaatctttttttctataaatttattgtcagagcagttgagtcctcttttcaccaggaacatgtgctctttagaatgtaatggagtttcatttatccacagaacattgtcttaatattaagcatggttctatgatagtattattattaaaggaaagcatatatttggaatagtttgccttaataattctccaaattggaaattaatctggtataatatattttgaaagttaatctttaatcaccatttaaaggctgatattttaaaggtagctaactttatcatgcttctgtaactcttagctgattactagaaatactattttggttttgaaactattagcataaaggattccggagagcaatcataattccagtataatgccacagttgaaattcaataacagtacctaataattataaagataaggtgagtagttatatagctggctgtgtcaaatgcttgaaaataatttcagttgacagtcaatttcagcacctttacatttataaattacatggatattgagcttggatattttagattggatagaaaaatcagatggctgtcagtttgtcatggttataatggtgactaaatattactcaggtattactcagacctatgtgtaatagaaaaagaaaattcttatttcctcatctaaagtcagtgagtggcccaacacttgagtgaagatctttgcaagcagaaataaattcttagattgaaactttagcccaaccacagtaattcatcttctggaaagctgaggcttttcaaatcagttaggctagaatgggaagcaaatcccattgaaagatataaaactatgagggagaaaagaatgacagtaaacaaatctgagctaatgttatactgttgtgtatgtctttcttttaaaatttgatagatattttgctagatgatgctggtgatgcaactggacataaagatggccgcagtgtgaaaattatagtctccataagcaagggctatggtcgagcaaaggtacttctttaatcttaaactctttattactaacaatgagaattaccatgagtcaagtgtattttatgtgtgaatatttgatctggtaaatatcctacaacaattgtggattggcattagcttaacatgtcatacaaacatgaaaaggacaataaaatgatgacatcatcatagaggtagaaatgtgtcttacatgtacctcacattcattcactgaaaataatattaacagcccctcatttctaaaactttaaaaaatagttatttctttggcaaacatcttgtctgacatattcttttggtttcacttatttgttataggtaatgtttatgatgtgcagtcgctagagctgtcaatatggtctttatacaaagggaagactctaaactaaatgaatattttagaaatcagaaagacacatgttctactgaacttggtaggacaaattccattgatgttacttgtctatttaagcaaggtcctagatgaccagacaagtattttaatttttttgcaatgaaatattgccttcaaattggcaatgccattctgactctatccctttcttaaaacaacaacaaaaacaaattttaagttaaaattttagttgagtggccaaaaatacaaatttctaagtatccaatttttttacatcaagcaaataaaaattctttagaattttaaaataaagtacttaagtttgaaaagtaagatagcacttgtgaattcttaccttaagccaatgttccaaggattccaataccatcaactttctgcttgagctgcagatgtgtacctacttttcccaagtgggtctttatgtgagagacagtaatactcttagtgaaacataaactaactttgatttaaaagcagctttttataaggtattgcataagcagtaattttaactgggttataaacacactgaaaaataagatttcctgttcacagtaattctaacagacaatgcctttgaacacttttttctaaaaaagcttccatgaaagtacttgtcttattctacttggacttccataataaaataacagactaggtggcctaaacaacagaaatttattttctcacagttctggaggctagccagtctaagatcaaggtgctagctgatttggttcctggtgagggctctctttttgcattgcaggtggtggaattcatgctgtgtcttcacacagtcttacctcagtgtctgtaggtaggaagagagaaagactacaaatcctgaattatctactttacccagtaatcccatcatgaaagtcccaccattatgatttcatttaatcctaattacctcccaaagacctcatctcctaataccatcaatttggaagttagggcttcgatgtatgaattttgaggagacacaaatatcatttcataacaatagtaacaaaaatcacaattgtcagctgtggatttctcaacttattctgcaaaaggtattagattctaactcagattatacctgaataattttgataaccatttatccttatggtgctaaatattacatattaagagattgagggtctgagccagctaagtgatttacctaaggtcacatttcttaattaggtggtaggtattatgtgttatagaatccatatcttctaactcatgactcagtgattattctaccacccgttaatgataacatacttggtgactagaaccaggattataatatgtcaactatctaattatatctactggaatcataatcactatttcgttaaccatttctggtcatcataatagaggctctagctagactacaaattttgaattatttacctttctaatatatgtagaaatttctcaaaatcccatcctacaaaaaagatagatttggaaccattatgtttattataaaataattacttgtttgatgaaacgaatcctgtaggtttctctggcaaggtcttttaaatagagaatttctgataaattcaaaatggaacctgttttgtaggtatgcaaataccttatattatcatagataacacattttaaagcgagattggattctagattaaaattaataaaacaactgagttttggacttatcaaaggtaagatcacaaaatagtaagataaagttctagaattcatataatatggttctgttctgtctctctcaccatttccctcctaccaagctgcttctctttaagaaagtatgcactgcattataatgcaagagtattctttcagattccttcacctttgccttctacagaacaggtcatggatcagttttcctcgacatgctgctttatctcatctctttctttcttgttgctgttgctattgctgttactttatttgtttggttggttagttggctgaaatatgttttatgttatataatccaccatgtgtgtctgttactatagaagccacaggtttaacaaatagtttagtcttaacaacaactacattaactaattttagtagaaaatgtagtaataaaaaagatacacggttggattttatcttactttattttgttcttatttaggaccaaaaatctcaggcatatttgataggatccattggtgttagtggaaaaaccaagtgggatgtcttagatggtgtaataagacgtctctttaaggtatgttgtgcaagacaccctaatagtacttttcaaatatgtttctctttaattgttttccataacttcaatagcagagacacatcttcttttcctctcctcaaataaggaaagctttctgtttgtgctatttgatattaacagttcttatattacccatttctaatattcttgacaactagctctatatccctgtgagttatgtatttgttgtagatgagttgaacctctgttttgattttattttttgtgtgtaccattgtaggaatatgtattccgaattgatacatccactagccttggtctgagctctgactgcattgctagctactgtataggagacttaattagatcccataacctagaagtgcctgaattgctgccttgtggataccttgttggagataataacatcatcactgtgaacctcaaaggtaaaagcaataatgaaaagcaaggcagaaatataatttttagcaacattttattctgccccccgcccctttttggccagtttcccttaaaatttttctatttgaaaactctgtagtattttaaaaatcaatatgactcatttcataccaaaactattaaatactacaatcctactaaaaacactagaatataaagaaatttagttctttgggttctgggatttgaagattcaagactcacaaaaaggaatgtgatttaggaatttcaaatttctggattttcttcattatcatccttcattacaggaggattcaaaacatttagtgtgtattccaaagttacatattcattgatatatctttgattttaaaatgtgtatgcctaataaataccccccaggaagagggaatagaagttaagaatcaaggatggaaagttctgagaattttctttgctttagatgatgtgattaattataggctaatgtaatatctgaagcatctttgtcttcacaattccttgtttatttatgttaaagaatcaggatacatctatataaactgtgagttaatagaggaatttgtcaatatttgattttatgatgaaggtaattgagttcgtaaaatgagatactgttgctcctttcttaattccttgccaaacgtaacaatttgtattcttcaaaagcttgagtggttgtacaactaggatgcataatgagagatagaagagaataaggagatggggtgaagagaaagtaaaagaaagaacacacacacacccatatatatatatatgggtgtgtgtgtatataatcttcacatttattcttcacatttattcttatagtcttcacatttattcttaacaaagataatcatcttcaataaaagatgttatgatagcatttataatgcttccatttctctctggaaacataaatgaaaacaagaagtagacagtggagtgaagcctgaagaaaaagaaacagcttgcttttgtttagatgttcactctgccatattactgatatattttcttccttgaaatggcaacgcatatttgtgggatagaaatatctaggaaattatttttcaaggactctattcctatgactaacaatgctgttgctgtttagcatgatattttaaattctagcttatgtagaacaataaatcatgctatttttttgtttcttctttcaggggtagaagaaaatagtttggacagttttgtttttgatacgctgattcctaaaccaattacccaaaggtactttaacttgttgatggagcatcacagaattatactctcaggaccgagtggtactggaaagacctatttggcaaacaaacttgctgaatatgtaataaccaaatctggaaggaaaaaaacagaggatgcaattgccacttttaatgtggaccacaagtcaagtaaggtatgttacagaattctaagagaacagctacaatttatccataagtgttttaagcaatcaaattataagattttgtgagacttccatgttgtacatggaaaagaatatccatcttttttttactagaattgtaacctggtgagtgatcaaactctgtttcatgaatttgaacaagactactattttcagtaacattcagttatcaggtactccctaagatattgggaatatacagaataatatgacaggtctcctatggcatggtttctcttagacatccacctagaaactgttacagtagaaagaggtccgtgcacaagcaacaaggaagaataacttttcttggaggcatcagagctttataaaggggtaatagtttgttggatcttaatagataagtaggaaataacatgggttttgcaggaatggagatttggcaataattagaatattccaagcagatattctgggagcagcaatttgcttatgtcacatctccctaaaatttttgtttaggaaccttaggaaagttaacaacattcaatttcaccaccatctacggtctaatgtgccatagtaatcagcctgaacactcagatattaaaaaggcatgagggcctatacggcgtagcctgtactttcttattttctgagtaaaacaaaaaatcctaaaaaggaaatagttgatggctaacatatttttaacactaacctagttttacctgtaattatttattaaagtctgaatcaatgaaacctaaaagtttctgtcgggaaaatgcaactattataagcaataccttgagggaatcccaattatactgggtcatattactctttcaaggataacctggttcaatgatctaaactgtcccagtttctcagaaacctgaaatctgcaaattttcagaaataaatgtgactcccaagagcagcccaaacccattagattcttgaaataagccaggcatatagcttaatgaacaaaaagtattaattttctcacctgtaaaatgagggaaatagtagggctattctaaagactaaataaatgagtgtgtatatgcatgtgtgtgtctgtgtgtgtgtgagagagacagagagaacagcgcaagtagcaagcacgatataagagttgcttgcaatttttaattatagcccttggctcccagtgaagatttctctcacaagcatacacacacatatgcacagtgcacgcgcacatacacatacaaccacacacacacacatctttgttcaaaaccgttttatatgtgtccttcaaaaacaacgatgtacataaagcacaatgggatctcttaaagttaaataaatgcaatacataaattctgaatatttccttggaactcagacctattcaaatgtggttgaaccaccatctaaagaaagacatagaacctgaggtagagtatttggctcttctctgagcaaaagtaggaagagcacaattgtctgtttgcttcagctgacatgtttaatgcttcctgtgaattctgtctcctcatatctttatataaaagccttttagcacagttttaaatattttcagccaaaaaatatgaaaggtttgaaaggcctcttagtcatcctcaatgtttgttttttcctcaatgttggtatgacaaaactctttacaaggtactttttttatggaataaaaaagtgtttagaaaataagagcaaaatagatttattggaggagaccatgacattttgataaagttgaggatcacttaaaatcgttttgaattaaatagatgaagtttcattagaatgtagttaacatgctaaaacaaaataggtaattcccattaattttaaaacatagctttccctaaaaaatatctatctgtctatctatccatctatctatatatgtatgtatatatttcagcttaggaaaaaaagtttattgcttagagatgttctgttaagaacatgttagtgtcctattaacttttttatgaaatatttccgacactcttattttttgctttttcagagtacaggctatttgtgccattattaggccagttcagtacttcattgcaaaataatgggcaggggaaaagcattgccaagcattggcagagctaatgatgctaggaaacagtcataggaagaaactgtttttatttttttattttttattattttattttatttttatttattttttttttgagacagagtcttgctctgttgcccaagctggagtacagtggcacgatctcggctcactgcaacctctgcctcctgggttcaagcgattcttctgcctcagcctcctgagtagctgagactacaggtgcccaccaccacacccagctaatttttttaatttttatttttagtagagacggggtttcactgtgttagcaggatggtctcaatcccctgacctcgtgatccacctgcctcggcctcccaaaatgctgggattacaggcatgagccactgtgcccagcccagaaagaaactcttgaacaaatcacaatagcattcattcccaagaaaacacaaattataactaaaaaatatttattttttatgttattccttatggtttgaagatatgaacaagctatcagtaatgctgaatacaaactcgttgccagaaaatttggacaatttttgccaaattgacagagaatacccactattttcctgggagttgggggtgagggtaagtgaggataaatataaaaaaagaggggatgacaagttgagattgtgttagggataccaacagtgtagatttactgaagtaacatgataatgaggcatgaaataataaatcctgttcctgaaaacctggagctgtgtaaatgctgacgcattttatgctgtgccatagatagcactgaagagacaaatccaaaaagcacttactgattcagaaaaaaagaagaaactcaaaccacaaatcatcaaatgaaaaacatcttttcatgttttcagtacctctgcactttacattctgttcctcttcccacacttcaagccctccctcaagctgccagctggaatattttgattgagagcagtacacataaacaattacactttgtgacattcgatatagtaggcccagagggctagaggtggatttagtagagaatacatggtcagctgaagccatttggaatgttaggctggaaaagatcagaaaactgtacctgatagattcctttttagtgtgtctggagtcagcatctgagaaagcagtgatctaccatttttatgtaactgtggtgttccacctgtagtttcagagtatgggattcatctcattgccaactcccatctggtagatatgcctgtttccttctacctgactagatctggaaaaaagacttttaatgccggtgcatcagtgcctcaatctaagatttcattttcatcaagctagagtgggtatcatgaagttatttcaagggaatctgtgaaaaactcctctaagttataggaaaaaagtttatttatgtttgcctgtttctacatccattgctttatacctaccatcagattcccaggggatccactaccctctcaagatgaaagaaagccacattataattagaacctaaaggctctgattgtccaaaaatgacccagtgacctgctaattacaaaactcaattcctttgtgcctccccactctctctctctctttctgacattcatgttatcattttctccttgtttcctgctccctggtaaattgcttttcagtttttttctctctgctcttccttcacttcccagtaaatgaaactgtttttctttataatgaactattctgttctctctcacttttattctcctttggatgactcttgtggcttcaacttggcttgacttgtgtggttgacttcaattaaacactatcagccatgcccattctcccaaatttgtaagctttctatcatcctacacatatgtttctattcacctactaaatatacctgttgagaattgacaatttcagccccaaacacatattataagtttatcctcttccattgctttccaacaaaaccaccctccaccccagattaacatcctcctctgttgtttcttggatttctacaattattttttaactacttgatacacgatttcctttaaatttcccttctctctttttttgggatatattcattcacctcatggaacatagaatatcttttcataattaaaatctgatcaaatttttcaatgttttcttatagatttctgtactacatcaaaaacatcacgttgttccttgttcagtcccttagtatctctaggcttcaataatttcaacattctcttggctggtcttgcttcttcctttcaatatgctcaccacatgttaaatcaccattgtgactacttactcaggtcaccagaagaatgtttcttcactgccaaaaggagatgtccagcgatcttactaatcatttaaggttgcagtttcctttacaatttcattaccaccatttcctttcacaaaacacatattcttagcttttttcctacatggatatcatattttcgtgtttctgactggttattcttctctatttggaaagctcttctgttgtgtttaagcatcaaggtattacccaatctttaaaataagggaataatagcaaatcatactgccaccacagtacattttccagacgctacaatcaatctttacatactataaacaaaatctttgatctatacttttttgaagtagtgtattattttgactgtgaattattgttatatatgtatatgcctgaccttctattccaggaaggtaataagcttcttaaatgctatttccttttctaattaattcttctatctttcacatttctgtttccttggataaataaattgctttcctctactgaaaacaaagaagcaaacaaacatatcaatgttccacacttctttatataataaaatgcaacttcttctgcatggattcaaagtctttttttcttttttattgccaccaccagtagcatgtactatatttttctataaccacagaacacttatttcccaaaacacatcatacacttacacttttcaggtttcactttttattctttagatttcaatcctttttattattattattattatttgcttttttttcccttttaaccactgtactctgtttttctgtgaaccttaagtctggattagatgcctctcttatgtctccctataatgttttgtgcatttcacttagcacactgtattgtgaatcacttgctcaccagcttctctgcttatcaactctaagtttctgaaagacagaaattatgttttatctctaaatccctggtgccagcaggatgtgccagttggaattaatctctttccctcctataggccacatgcctcctttatcctctctcatggaatgttttaccttgcattttgtaaattcatcattatttacatgtgtgcctaccaccccactcaggctccagtgttacctcctccagaaaaccattcttgacacccagcagctaggctaaatctcttcccttgacttctcatatctcataatatatttatgatattatattgatatcatttgtaacatttaaattccagtccctaatgtgacaactcttagagcttgcaggggaaaccagcctgattaccctttttagtcctcatgtccggaaaagtacttgatgcagttcataataaatgttaaacctacttaaactccattgatagcaggaatcagacttcactatttttgtatacccagggcttggtctaaggctatgaacgcagtagatagacagtgcatattttataaacgaatgaatgacttaatgtagctaaattagtgacataaattttattttttcttttgaagtaaatagaattctccagaatattcaacagttttaaacatatttttttctgcattctctgacttaggcaagatttattttatgtgattagctcaatagaaaacaaatagtactttatttccttaatacatttttatatttgaacataaataaaaattactaaatgcctcaaaatcctggcccgttgttttatctcctacttttatttccagcagtggtgttacagacagagagaggttgcatctagagtgagcaattcacatatttacctggctgccagaaaccaaaatcatggaattgttttataaccctgagcacgatttgcaaattgaaaatgtcattgtaaatatgcaaatattatggaaatgttcttactgattaggataattttaagaaacctaattatgttcctggcctacccatctgtgagagcagtcaatcagcaaactggttatcatatttagattaaaagctattagacaggaataatacctgtaaaagaaccaataaactcaggagatgctaaattttgtctttgtttaaaattacagcaattgcatgcagattataaataaataataagcatacttttatcaaggtcctatggctgtacttttagatataccccatctacctgaattagaattaacacattaaaaatattagtggaacctgagaaatgccattttgaatttagttcatacttgaaatattaaggttgctaaaatttacttttatcattgaataccaaaactcagaataaaatctcaatatatgtggtttatcataagagttcatatccagaactcattttggcttttctttcagggagaaaaccacttagaaatatgccgtcatgtttatacttttatatttgctgcaggtgtttggtactggatcttctattgctttcctttttcttgctttcatttaaaaaaattattctgtcagcaatatatggtttttgatttgtaggaaaagattttacatcagttgaataatctatgactttaatgaaagaaacggaatagaggacaaagagtgctattcctaaaatattaactgcttcctattagtataaatttatcactgacgtatctgttttcttcattttttaaaaggaattgcaacaatatctagctaacctggctgaacagtgcagtgctgataataatggagtggagctcccagttgtaataattcttgataatcttcatcatgtgggctctctgagtgatatcttcaatggttttctcaattgtaaatacaacaaatggtatgcttatcaaatattctgaataatgaaatatgaaataattatcatcaaatttgccttcttgtacctgtatgcatttttaaaatttgtttaatatttaatttttattttttaaattgacagataaaactgtacatattgattgtgtacaccatgatgttttgaagtaaatgtacactgtagaatgattaactccagctaattaacatgtgaactacctcagtagttattatttttagacttacaatggctgtcattaatttgagaaaccctctttaatattataccacagttttaaagactccatatgcattccttagaatatctatgtattcattcaacaaccatatcccaggcactcttatggaaacattacttccttgatgatgttagcttctgcagacatgatgaacatttgcgaaaccaacaacaacgttggaatagttttaatcaggaaaattaaaaactaactggagcctttagagctctggtttcattctcagttcatattaaagtttaaattcaacctttctatagagataaacttaatatattcagatatagctccctctattaatgagtatgatttttaactatttacaataaaaggaaaggttaaagtaaggtattaaaaaatcttaaaacccactaaagattcattgtggcatggcctctaaagaaaggacatataagaatatcaacataaaataaatagttttaatagtgtcaaatattccaattatctctgctagagatttttggaagttacaaacgatcagcataaaataaggaatgaaagaatacaaattttctcacaatattaatattctttaacataactatgaaatattaaaatagtaaaagttaataaattttatcataagcattataagatgttagagtgggacaaaacccctatgattatactaactaaactctttactcaaatactgtaaattacaaataaactcaggctcggagagagaaaatgccttgccttgattccagaactggaattagaaactcaagtatcaatttctagtccagtgatctttgtcattttccattacagaattaccctttaaaagacaaatattgaaatggaataatccatatctatcctagtagttttccaagataattttaatgaattaatcacttttacctccagtaaattaaaattttctatttatttttttctagtccatatattattggaacaatgaatcagggagtttcttcatcaccaaatctagagctgcatcacaatttcaggtaaagttaagttgaaggtttttttgttttgtttttttgttttgtgttggggggggcaggggagggggttggcattgtttcttcctgtttgtttttgtggtttgtttttccatttgtactttgacaaatcttgccagagatgacctgtggtgtgaaaataattctcacttctgacactctttctcaagccaacgttttgtgatcttcaacctgtaatcagatgtgtttctttaaacaaaaacaaaaaaaaaaaaaaaggaaagaaaaaagaaaagtaaagtagatgttttttctgttcactatgtccctggttaaagtagagcatattccttctaagtgtgagaaatgtgaagagagttgctatttcaggatttgtgattctcctacagaagagtgatcagcatttagactcccactcacttctgacgcacatgagcttctttttagctcaaaaagtagagttagctacattatagctctcatcctagtagacctcctaacacctttgatcatgaaaaggtggccaccaattgaaatgggaacattattactttctattggaaagtaataatgaataaataaataataatgataaagaatcactgtgaatgtaaaatttaatttatataaaaatgtctgattttttttctttttgtaggtgggtattatgtgcaaatcatacagaaccagtgaaaggctttttaggcagatatcttcgaagaaaactcatagagatagaaattgaaaggaacattcgcaataatgacctagtcaaaattatagattggattccgaagacgtggcatcatctcaacagttttttggaaacacacagttcttctgacgttaccattggtgagttccaaaattataatatgccattttccaggaactaacagtgcttggtaaagacggccagattggatggtagaaaataacaagcaaagctaatgcttattcaagcttccaaagatttatttttttcccttctgaaagtttgcgttcttcttctttgtatctccaattaaatccattttgtcttgacagttatgttttactaaaatattaccgagatcagataagttcaatatgggcaaatatctaaaaatcagataaccactggaaatgaatagtatcgatttaggatactttttatgctaaaaacaaatttggctaaatagctcatgtcaaataaagttgtgaggaaagatgttagttacagataacttaaacgctttgtagataatttaagtgttttgtgtttttcatgaagacaaaactgttttgagttatttctcttttagtttgcataaagatatttacatttttattccttctttaattgcatgtacagaagtctctttcacattgttatgcatcataaaaatgtactcactgtcaacacagtttagattaggaagaagaattctacactgggaccagaacactcatgccaggtcccaattctgcaaataatgacgtgttttatatttggcaattcatttcagcacagctttattgcttgtaaaatgaaacaggataactgcattatgacttttatcatttctcctgactctagtatattgtgccctagattaatatttattgtaaaaagatagaataggctaggatattgggtcttcagtaaacatgctttaataataatcaagctggccaataatacaattttctaggaattttgcaagaaatatattatattccaaaatggtgtctagatatgtgtttagattattaaatataactcttaaaatattttgttatttatttcttatcaggtccccgactattccttccttgccccatggatgtagaaggttctagagtatggttcatggatctctggaactattctttagtaccttatattctggaggcagtgagagagggtcttcaggtatagtactcaattttcattgctatttttttttaaaaaaaaaaagcaaaaaaaattactttaaaagcaaaaaaaaatatctgggtatttatgcagaaaactaaaggcatgaactatatgaatagagcaataaggttttcaagagcaaatagtttgtaatattttgcctgttctgagaacaaatttgtaagagaaagaaaaggcacagttatttcaacaactatacatttaagtccaaatggttgtcatggatgtttacaggttgtttttattagacagctagttaattgcacagttctacatcttatgacacagccatgtttacatgagccttgaccatttatattcttatcacataatttcctttatctttttcttcttttctttctccttccttcctcactccctccctccctccctctccccctccccactctctctctttctctctctctctttctttctttgtttcttctccttcttttttttttttttttttgagacagggtctcactctgtcactcaggctagtgcgcagtggtagaaccatggctcactgcagcctcgaacttttgggctccagtgatgaggctttccaagtaggtgggagtataggcacacaccaccacactcagttatttgtattgttattattattattttagagacatggtctcgctaggttgctcaggctggaattgctttttcctttttttcacataatttttgacaagtagcttttgcttgtaagtttcctgtttttagtatacttcattgttggaagccctttaatgtcacttgcaggatcctttactattttggagagagtactctaaattctaagagagtcagttggtcttttgatctatgacagattggtttcacagcatctttgctcttcctttcatgtgccttctatcttgaggccctgcaaccaaggcccttctattttttcctaactaaaagatgaaaatgtatcactaaaaaaaatccctacttctccaacaaaatacatgtcatttttccataagtattgctatttccttaagtttgatttgaaattgtagaattataaaactctttaaaatctgtgtaacataatcacccaatttattgaggaaggatctcatctccttttcagtaactcagccaagacatctctatttctggtttttacaactactattagaattaagatatagtttatgttttccacattcagtcatctacaatagtgtgttgtctttattttgctatctaaaaaaattgtccatctatttttccctcttttactcccttttactgtcaggctctctttatctattgaatggcatggcagtatttggaactaaaatgatagttctggtgaacatgatgaattttatgaggatactctgaagcctcagagataaagctaagatcctaaataatgctattgattggttctactctagatttaaataaccaaatttaacacttttaaaggtatgagccaatctaccccaagcagaagcctccaataaaataaaagcttatacagatgtttttatttttcaagtataacatattgtgtttcagaattcttagaaaactactataggatatacattggatctttcaatgttgattatttgtaccaaaaaaaatcattttatgaaaattttagaactcataattttgaagttaatatttcgatacattatttgttctctagctatggttttggttttaataaaccattatctaagtatttataaataaaattctcctcatttaatatttgtttactaatagaaagcaaaggaatctttgtaaaaaccttgaaatgataatagttaaaatgcttagcatccttaggtcttatttcaaaaggtacatgggttcttttttcatatttaaattaatattatttatagaacattatttggagaattataattctatgaagtttccatttgggcaaaagtataatcacttaaggattagtttctcaaactaaaactgagagatatttcaaaattatttttgaagagggataaaaatgtctcatttcttgctatggttcaggatgtttagaagtaggttagtgtgaaagatgaatcaaccgtgatttagggctttttgggggaggggaatccagcacatgggaagggaaaaattggaaagtccttttgtgggtagacagttttcattgctattgaagactatgctgggccagaaaagtctatcagctgaaaatatttctaggggagcaagaagcaaaggaattatatctgtcgtgatccattcccatggatttactggcaacaaagaatcttggattggagaaagaagtggagaaacaaagcctggtagcaaaaatgacactcttaagtttagagtaataaaataatatcttcagatgaaggcggatttttttggtgaaaaaccttatggggaatgcactctgccagatgttttagttggaaaaaatgttggtgatacaatggattttgatttttttctggtggattctttcttaactagtcagctatcaattcatctcattctgaatatttagagttctctttgttcaattattttttctacaatatgtgtttcactcggaaatatagtgtttggcccatttagcttttcactggtctcttccaattttgctgtcctggatggttctttaaaaacctagaattaattgattctagacttacattaaaacaaacaaacataattaagctttccaagaattatacatgtttttcttcaattggtttaagttgtgtagcatgctatatgttacatctataaagtaagtttgtaactgagaggaaacttttgctctaaaacaagataactatttttaaaaaaagtataatgattgtacctctgttaccatctcctaaggaaatgcacagatatcagtacctagactcccttttattttaggtaagtccaacttctccagaagaaactcaaaagaaaactccaaggcagtccatgaagtttttatggtgttaatgtccaccattttcccttttgtctttactgaaccaaaacaaactatacaaaacagccatctaacaacaaaccaaagtatgtcatctgagaccaaataggcacctactaaccaggattgtccttggtaaagcaagtcaaatggggagggaaagtaatttaaggaaaaagtgtccctatgttactgcccccttctcttaattttcactttttttctgtgcccttgtaatattatacttttttttttttttcacaatgtctcattcttctcttcaggctgccctttctagtttgggttcagctttgcttgcagcttaaaaatgtttaacatctcttggatttatctgattcttccattccactgccagtactttaaccaggctatatcagctcttacttattgggcaaattgcacaataagggttcttgcaaagttgataattcagtttcctattttttatcctcttttactagtggcctgaaacacaaacatctaaaaagagtttttccaaacaccgcatgttctcactcataggtgggaattgaacaatgagaacacatggacacaggaaggggaacatcacactccggggactgttgtggggtggggcggaggggggagggatagcattaggagatacacctaatgcaaaatgacgagttaatgggtgcagcacaccaacatggcacatgtatacatatgtaacaatcctgcacgttgtgcacatgtaccctaaaacttaaggtataataataaaataagataaaaaagagtttttacagaaagcaatgggattaaagagcaagttgatcacaggaaaattgttatcagagaaagttttcctactctaaaagacagtttgagtagagtgaattaggcagagaaaaataagttacttttattttatttccatctttccaaggtacactttagtagagaactctacttaatatcaagcatattttttaaaatcttccataattgaagcttttatttttcaacctttagttttctcttggtttgtcaaattactagtaaatgtgggcagtcatttctatgtttatttataataaacctcccgtatattctcccccaaaagttgacatctattccaaatattcagcttcattttgtctagccttcaagtttaaagtgagctatgtagacagatacatgttttaaatctgcaaaactgtatacagatacttaattctcttgaaagtcccttaagaactcaatatgtcaaaaaatcacatccaactagcagtccccttttttgctgaatagaaatgcattttatatatatcctaaacgcgtggtcaacttttagatgtatgggaaacgcacaccatgggaagatccttcaaagtgggtgcttgacacatatccatggagctcagcaactctgcctcaggagagcccagccttacttcagctgcgaccagaagatgttgggtatgaaagctgcacatccactaaggaagccacaacctcaaagcacattccgcaaactgacacagaaggagatcccctggtaagaatcagatgttcatttcttcctatgtaatcttgactacagtgtatagtcattaatatttagttatttctagcgaagacatttgttatcctaagcaacatttggaacagttttaaccctattatctttggcctgctttccatggatgaaaatcttaaagtgaaaaccaaacttgtatgcttaaaaagaaatcaagaaatgctacaaccagaatgaactcctagactataatgtttctcttattatgcattaaattgtgtatataattaaataaatataattttctatattatgactcaattcaataggcatttaagagaaaactcaatttttttcttaaatagaaaaacaaaagttatggtataatgtactcatggagaactaaaaaatattttgcctatatcaactaacctgactaattttatagaatgggtcttctcttgcctactgtagcaaaggataaactgacttggaagtcaaatggaagttatggtttatttactttctaaaatagtggaataattgaaataaaagtctgtaaaactccaaagtatgaatattctgaaaattttaagtatgtagtattattaggaaaaaaaacactttttatatatctatttttatttttacagattactttcaatatattggtatcaaatgtgaagtgttactaactcaccattctatgagtatagagcttattggacttttacaaccagtacagaaagaaaagatactgaaataaaaattcattatgttgcttaaatcaaactaagacaaaacataaataattaaaaatcataacctatggctatacctaaggatataaaattacttgatattttaaggaatacccttacaccaacaaccctgacacacacatcatcatcatcatcatctcagctgaacattttgggagtttcttgtggaaaacctgataaactttcaagatcctttacccagcaaaatgcatacacactgaaaatttggcatacaattttaagagtttcataaaatcactgaagtatatatatagacctacttagattccagggatttcctgctgatttctgatctaggcgatatcttccttaagagcccagacttatatttttataacatggtacctggccttttagatgattcatagttaggaatcaacagtgctgatgaaattggtttggattcagcataattgtgagcatatactaaataattgctgatagaatgattaacagagtaaatataagctttagaatatgagtatggattatttaatctgaattcctcaaaaattccagtcctacctctgcagtttttatataatatgtctgttttataaggagaggtgtttataagatttgttctcagttttagtctgtagagtatgaaacccttaggaaatgcccacaactttcccaattctcatagtccagctcagctcaccccataaagcactttttttcctggttctgaatgcacttgtcttctagtagaggaaacaaattcaaggttttcccttctggcatgagaattggggtaaaaaaatttcctggttcctaacctgctgctctattaaacatcttaagaaacagggagttatgaggtcttacatgctaaatggtaaaagacgtcatctaaaactaaatatttggcaggctttctctggttttaaaaaaataaatatttctatcttttttctttctttcttactttttttttttttttttttttgagacagagtttcattctcgttgcctaggctgtagggcaatggcacgatcttggctcaccacaacctccgccccccgagttcaagcaattctcctgcctcagcctccagagtagctgggattacagtcatgcaccaccatgcctggctaattttgtatttttaatagagacggggtttctctatgttgatcagactggtgacgatctatctgtttttatttctatgtatttttgtaattactagcatgaagccaacatatattttcagtccattctaaatcagaaatcctacaaaatatccactatttagtgtcaagaaacatccactatttagtgtcagaaatccccatagcaatgagtgtagcaaagaaacagggaagaagagaggagagagactttttgaatctgaatgaggatgcaagtttttggtatatctcacattattttaaaaatacaatgtgtattcaccattaacaacaaagagaatgttaataagtatgtccttaatgctaagacctggtgatcaggagataactacagtatcatttctgatctcaagaagcttaaaatccagtagtgaagagagacttctacctatatgaactgcagtaacataatagaggcacatattaagtaaaattgtgagttcattgaggaagcagttagaataaagctttacagaggagatgcttgagctggatcttgaatgattaataggagttcaccatatggttgcagggagaacatccaaaattaaagaaatagaatgtgaaacattagaggacagtgtaatagaaatgatgagtttagggaactatacaccagttggtggtaggaattaaaactgtggaagtatacaattgctagatcatgctaagccttgtttatcattgcaggaagttaaaacgttatcacagagacagtggagaactgtcaaaggtgtttgagccatgatttacctagttagatctgcagtttctaaagatcactttaataacagagtagagagaggacagactgaaggagataggatggaatctggaagcttagcagattagatggtaccagtgatgataaggacttgatcaaggtgttagaaatgataaacattaaatttatggctatagatgccctattccatttagtgttgctataacagactatttgaggctgggcaatttgtaaagaaaagagattcatttggctcatcgttctggtggttgaaaagtctaggattgggcagctgcatctggtgagagcctcatgctgcatgaacttacggtggaaagtggaagaggagtgggagtgtgcagagaggtcacatggtgagaaaagaagcaagactctttaataacctgctctcgcacatgaactaatccattccctccagagtgagaactcactgacccctaaccagaatgccattaatctgttcatgaggaatccacccccatgattcaacacctcccactacgactcacatcccaacactgccacaatggggataaaatttcgacaagagtttcggaagtgatatatcacacgcaaaccatagcagtgagtgtggggaagaagtggggaagaagagaggaaaaatattaatactttttggagaattgtgatgtatcacgataatgactaaatcatacgtaatcttctcttgtaaactcccttgatttgaatgcacaaaataatactaggcaaaggcaaagtaaatcccacgtatacatttattatgaatctgagatgtggaatgtattataatggaacatatttactatatgacaccattttaaaaaattaagactttaataacaatactattacacagtgaaacttttacaacatccagcattcaagtgatttcaaacatttgtgcctaagatacaactgtatcttttttaaaagatatcatttatcatttctactcttactaaatcactagggtgctcaaaactcagttttattttacagatcagtttcacccaaatgcttgaacatacaggcagctgctaatgagtgacagatagataaaagaaatgggagaaggaatatgaatggacatgaaagtaggaaggtaggggtgtgggtgacagagaaagagagaggagagtgggagagaaagaaactatgttgaaggagacatttgactttttggcttactgggtttaaaaagttatcacctactacttttatttcataaccttatgtagcttatttaataaattaggagagtcagattgaaaattaggttaaaacatattttcctgagactattaaaatgatttcaaattatgctgtaactgtagtctctttgtcagaaaggaattcttgctgaaattggtgattaccagtttatcatttatttcacaagcatttatcaagcacactttctgtaaagagcacacaagcatgcatagcttaacatatgaccaaggaatcgttttttagatttctcctttctatttctgtaagttggaaaaaaaaaacttttgattatagaataataaaattagtatgcattaggtaatataaaaattgttacaatttataaaaacccttgatatgaaaacaagtccactacccttgtaaagacatgtgccaatttttctgtgctttctaaaatcattgaaccatttattcacaatttgcctttaaacactttttttccgaaaaaaaaaaaaaagtccatctctaacagtggagctccagatctatcaaaattcaagcaatgtgactgctctttattttataatacatggaaatgctagctgcctttctccccaggtgctttcatgcatatgtcccttttactagaacaaacattaccattctcctataaggctgggaaacttgagacagccactattgttccagatgatagtttttgttttcagggatgtatcaatcatattttagccagaaatttaacaacacaaacttgacagtaattctttccttctccctcttcaaacactcatggtctgcttcattcagtcacctcctcccgaggtcagctcctaaacagcagatggtgtgcttgtgtgcagcagctggcttcattcctctccataccctccttctctcaagggacagtgcgtgtgtgcctctgtgtgcgtctgtgtgtgtatgaacattcacgactttcagttgccattcaatgctttctgcttctcccagccaaaaagctgggaagcttggcgtactttccagcaacgaacccagatgtccagctgtgatacagtttcctttccagtctccctgctggagcagtattcattcacaaccccaaataaaagagttatccagaggccctattttgtccttatggtttggtgttgtagtcatgtttgggagaaacagcataggagccaggggcaacgagtaaaaatctaaaattattttcccctgttacttggatgggataagatagctcttcggtgtggctcagggccttgttttttatgggctggcttactcaatgcatcattgcctacatcgatgtcttttttctttcttcagatgaatatgctaatgaaactccaagaagcagccaattactcgagcacacaaagctgcgacagcgaaagcaccagccaccatgaagacattttggattcatctcttgaatctaccctctagagggtgaaaaaagttaagggaaaagactttgcttttaaaaaaatgtttcaaaagaaaggtattttcactaaaccactgccagtataaaagcaccctgtcaagggccctgacccagagttgtggtctccaaggaggcagcagaactaagtctgaaccgccaagatgctaaattgcaatggaagcttaactttagtttatttctaagcattttttatatctgtggagtaatagaaagctccattactcaactggaaaggaccctaatgacagggcaactgaacagattgcacatgggatagccaaactggactttctttgtttcctctttaaaagtttacaatgcagaccattttttgtcccttccttttgtttcctctgaggggctgttcgccccaggcagggtccatctttctgatctgtccaacctcctttgtgccacacggtgctggtcacagggcttcagtagtgtttgtgttgtgcgctcaccccattccagaacaaatccaagaggccagtcctccataagcacaaatggaattgtgcaaccaccagaaaaacactactgtggcaaactggagaagtgccaatttaattctaactgccacgttctcatgatgtgctccaccaactttttagtatatgagtcactggttttataaggttgtttttaccacagtggtctttttaaaccacctgcccactcccttaacaagagttttataccaattattagtcaacactgataaaaggcttttttagggctttatttgtttgagccttttcagtgaaagaaggaacatttcctatggtgctgtctcactgccttaaaacagatttctatgacagtttaacagttggtttaaatcctaaaccattggtaatttccactgtcttttcatttacaaccaagcaacaccagttaacatagtagcctcatctctatatatctttctcttttttttttttttgaagaaatggataggagaaagatcagtatttttagccttgtgaatagatcgctttgcctatcctccaaaatattaaaataacccagaaatgctctttgaccgtcacttaaaacctaagacatgtggcgaaattccatccagttctaagtgaaagagtttcagaaggcagaagattttgaattattatccagcagggctggaagcactagatgcagcatgagcacaactattcggctttccttccctattgtttttgtttttttaatgagttttgacgcatgttgttttgattgctattgttgtacatgagaaattcagcattaaagaacactgaagcggtaaggtcactgtggaagaggaagcgtttatactgtaaaagaaggttagatttgcacagtctactgggtaggtattgtaaataataatttttaaaacttgcacaaatcaaaacaaacacaaacaaaattgtattttatcctgttggtgttaagaggtgtttcacttgctgagatttcctgtacattgcaaacaaatacagaatgcaaaccctcaaagctgtattatctggtgtgtttgtcctgtatttacagttgtttttgactatgcaggagctatcagtgctagagtgagcatgcttcaaaactgtacatgaagccaatatatttttggataagtaaaactgtctgaaagtacatctgtcatggcaggctttaaagagagtgcatgaaaactgatcagtcattggagaagttaccaccacacacaaaggacaggttttaagtttatgaaacccaagggctaggccatggtatagacttcttctatgagtgtgtgaaaatgtgttacttttaggacgtgtatttggtgctactctctgtgaccaccaatgggtcagttgctatagaacaacaacaccacgaaacatctgtgcagttttcagagtgtcacaaagtcaataggtccttacacggtgctattgccctaagggaaatccgaactgaatttatgcacatagaattgtcaccctgactttgaagcctcaaacatggatcaaatctgttgtgaaacatcaatatatgtagctggatgagtgactagtttcccttgtataatatgtgatctaagaaaattgctaatctttccctgccattttgagaaacacagtccaaacatgagcataaacagaatttcctgcaatacatcccagtaggtccacctagtttacaacttaaactagtttgtgaaacatttgtctgtatacattttatattttgtacattttgatgtaacatatcatgtaaataggcagaaacagtgaaataaatcatctgaaaagttttgtagtctttgtaaagccccaacaataagtacttggtgtcaatggacttaactggatgatgtattttctattggtttattgttcctctagcttgtaaaccagcttgcatatatttttttgcaaatgtgcaccctgtatctgtctaaattattactttgccattaaagtggaattatttattgacaacatggtgtggtttctatttatggaaaaaaatgaataattttgcatcaagaagtgtcaagctttaaaatgttgcttgcactattaatatgccatcaataggactgtatgcaaatttctattttataaacataaaaagggcttcagctttcaagtaaataaaggtaatcagtttatctttttcaatgatagttatttagtgaatattttagaaaactctgaatagttttcctaaatagccgatgataaagtaagaatataaaataaaatgttgagattcactgagttaaattaactcaataaatgtttctttgtttttattgcattaaatcctcttttgaacttttagctctaaagattattttaaagcaaactaattatttgggtggtagtttatttattttaatagagaagattaaaaaaagaaaaaagaacctgttttaaaattataatttctttttaagtatcttggaaatctctttaacctcagtaattggaatgtatatttctgatggtataagtaggattttaattctaaaagcaggaaaacttccgaattagaatagttttagagcaaaaaagaaaggtattagttaaaatagaccaatcatccataatgggttataatcagtgcatttgttccttcactcaattgggagataaggaaatttccacaatttatcttattcagacaaacattgaatttagccaaaacttcagtacagttctgctaaatgcaatttcaggctgcctaagtatacatcctaatattgtcattctttgtgtgaccttggccaatttactcaaactctatgtgcctcattttcctcactcataaagtgatgataataatagtatccacctctcacagattactctgaagatcaaatgggttattacatggaaattccttaaacggtgcctagccctccataaattgtaactgctttaacaacaattaattaacaaaatagtaagaaatatttattattttattttcaaacattcttgagaataaggtgtaaataaatttattttaaggttttgaaagaatatatattttaactcaatttcctcatttataaaatgggcatagaaatagtacttattcatagggctgtggagaggattgagtttagatctgtaatcagaataatagctatcactcaagaaactttcaataactgttagcttctatgttaacactgccgttactataaatgagtaatatcagtaatgtaatagtctcaggattcaatttactcatctataaaatgagattattatagtatctatctactcataagattgttttgaataatgaatattttaaaatatgtaaaatactcagaaaagattctgtcctggcttaaatgttacctaagtgttagctgttattatacctaatatgtgccaggcaattttcctaggaatcagcgccattgagacacaggctatggtcctaaaggatttaacagttagtaaaattggccgggtgcggtggctcaggcctgtaatcccagcactttgggaggtcaaggcgggtggatcaggagttcaagaccagcctggccaacatggtgaaaccccatctctactaaaaatataaaaattagccgggcatggtggtgtgtgcctgtaatcccagctatctgggaggctgaggcaggagaatcacttgaacctaggaggcagaggttgcagtgagccaagactgtgccactgcactccagcctggcaacagagcgagactctgtctcaaaaaaaacaatcagtaaaattgagtctttgttcctctcacttcttcctttgatgaatacctaagttctccactatgaggttgactgtaaaaagccctgtgaatagtccactgaatagttgtacaggatatattttcagatactgatagaatcaatgataccagtgaattttgtttacatttggagaaattcaagtactatctttatttcaggctttggatttttcacattaaaaaaagaaaaatattatttttataaataataggccaccttaaaaatgtctatttctatttctttgatcagtgaagatgtttaaaaggaagcttcaggccaggtgcggtggctcacatctgtaatctcagtactttgggaggccgaggtgggcgggtcacgaggtcaggagttcaagaccaacctgaccaacatggtgaaactctgtctctactaaaagtataaaaattagcaattagccgggcgtggtggtgcgtgcctgtaatcccagctactcaggaggctgaggcaggagaattgctggagcccaggaggcaggggtggcagtgagctgagatcgtgccactgcactccagcctgggtgagagagcgagactccatctcaaacaaacaaaaaaagcttggattatgtttttattttgttttctgtttttgggagggacagcaattaataggtaaaatattgccttagtgaattcactattatttttaattcagtgaatatgatttggataagtaatcattaagaggatctcttctctacataaagtatacattatctctcaattacccaggaactcatcaataagaaaacctattcatagaaattaaacagagcacattctaaactagaattttattagagaaaaatgaaagttctccaagtattttccatgaaattgtaaaaacaaaatactaatattaaataaatctttctccatcatttaaatttttaacacttgtccttaatattccagaatggcatggtagatttgaacttgataacagagtaaatactttttacactgattacatgttaagaatagtaatatttccaatatattaggctatattaactataatattaaaattaattcatctgattctttttattttttatttttatttttattttttgagacacagtctcactctgtaacccaggctggagtgcagtgtcatgatcacagttcattgcatcctcgacctcccagtctcaagcaatcctcctacctcagcccctctaagtagttgggactacaggcccatgccaccacagttggctaattttaaaaaaaattctttgtagacacaaggtctcactatgttacccaggctggtctcgaactcctgggctcaacagatgctcccaccttggctccctaaagtactaggattacatgcatgagccattgcacctggcctggtttttacttttttaatgtggctactaatgaaaaatttaaaaattaaatatgttgctcatatttgtggcttgcttgatatttctattaatgctgatatagagagactgatctttacaaaatataaatgtgatcatctctctcatctcttttgtattttgcttttaaaaataagactcaaataccaaaggacaacaattccgtacttaaactgaatcttgcttatccctcggcttcctttatcaccatatccaccacccctattttggtacattagcctaattgtagaacctagaagtaattgttgaaacaataacaacaataactttataactttccagacaatgtagctatgaccatatgtcaaagttttgttataatcttgcaggatggtagaaagtctctaggaggccaatttaaagtttctcttaaaatagagacatctatgggaaaggaaaattagacaaaatagagaagaaaatttaaacatccccaaactcttgactgccaggtaggtgagggtgtgactagttccttccttgtgacaaatatcatctcataattaaataattatttaaaattcccaaatgttttatcacaattcaaatttattcagtgaaggagattacaaactacatcaagagataaataatgttttgttccagaccaggtttggtacaatatttcttttacagtcatttcctttctcttaccccaagacctttatacagtctcaaatgtcgtttccttagacaaacctttctgatccctcagatgaggtcaaaaatctatgttatttgcttttccagaaaaaaaattatatgtgtatatatatatatgtgtgtgtgtgtgtatatatgtgtatatatatatacatatatatacacatatatacatatatgcatatatatacacatatacatggaattatattcgatatatagatatatttaattatttatatataattatttcatataatattgtggaataaaaatatttctgaacatggagacagcaactgaattttagcatatgttaagcaaatgcattaaatttgagaagaatgacttatacaggtgtccagcgtctcgggaagccagattagtaattcgaatgctgactgggtgaccagagaagaagcagataacttgaggactagtgttatttaaagcactgcctcatgtttgggaattttttttcccctttagatataatgtgctccatactttctatcaagttttctttttctttcagcttttcaagtttttttttttaaagatgccttagttatatatagtgcaatttcaatgtgtggggttttctgggggaacaaagaaaatacaccaagcagtagaaatgtaatgctagagcctagaggacaggtggcggctggaaaaatcaaaataggaatctttggcacagaaatgagaagtgaggatgtgaatttcactttgggattatcccccacaagagagaccttgaccaagtaaagactgagaatagatcttgaagaatatggtgaaaatcttcatagttcttttagtcattatttgtcaatttccctaatatatttgtgcacatttaacataacatttataaaggaatataaggggaaaaccattgaaataagagtcagaaaaatctgtatcctagttaagttttgtgatttctcctagaaaaatcacctgatctgctatttgtgttcttgtagattttataccctaagatgatgacagatattaaaattcacccaatgtcactggagtggttctatacattgtttgtgatacaaataatgtgtatctatcagatattccgggggagagtaaaaactctaggtatctggtaatagcccaaccaaaaacacttgagtacagttgtgttcagtctagtttgatctaacttgatatgctgtgcagaggcagctgagtatataagcgggttttgcagggtgatgttcacagtgtagaagctggaccaaactcccttataggctctttgtggtagagtggccatttgcctagcattagcaactctttgagggggcaggggatccctacttcccaggcaaaaatctttcctgataagctacttacattcctggttcagcccttcctctggttgcagcagaatgtaggcctagagattctcttcagcctcttactggtggggctagggactcagcgatgaagcaatgctacacagaagccagattttggtggaacttctgaggctgaaagccagcactatgaagagctagagtcaggtgcatggtggttggagataaagtctccaatttggctaccacataaaagctagagaagagtcttttccaatattagtggtttctcaagggagggaaattcacctgaactatataccccaatcataaggctttatgattttagactagagcagcattttcaagagaaatatgagtgctacatatgcaactcattttattttttaaagccagggtctcactctgttgtgcaggctggagtgcagtggttcagtcagagttcactataatctcgaactcctgggctcgagcaagcctcttgctgagtaggagtacctgagaccaaaggcatgcatcagcatgcctggctaaaatgcaatttaaattttccagtagccacattgataaaagtaaaaagaaggaggtaaaattaattataataatatattttgttacttaaatgtattaaaaattagcatttcaacgtaaaatcaagctaaaatacttttaaataagatcctctaaatattttacatactgctctctctttttctttttttgtgctaaaacttcaaaatgtagcatgtatttttacacttatacctagtgtgaattcatatgctaaattttcatcagaacaatttgatctgtatttagaattgaaaatatttacagttgatagattggcatgcttcggttgttccaaatacagttaaagtaaattatcaattttaaatgtaaacttaggtaattactatgaaataaggctgaaaattgtattcctaaattgatatactcatcaaatgctaattatccacatatgcccagtgattgctactaaatagcatagctctagccacacttggtaaggagctttctcgatcacttatagcgcatcttcccagctggaagtgctaacctgaggctttgagttggaagtttttcaacttaccgagtacagacacatttcccttcatacccagtgctggcttccagtagttcattgtaactattgcagggattctgttacccttctttattctcaagctttggtaaagatcaccttggtgatcttttgtaacactttcccttaacttcaattattaggtaaaaacacatggactccataataaacgtgtccaccccttctccagaaaagctcaaaattttatatatgtaatattcttgctctgtaatcccaggatgaaagtttcctactgtcttagtctagttgggttgctgtaacaaaataacataaactgtgggggttataaacaacagaaatgtatttctctcagttttggaggctgggaagtccatgaccaaggctctggcagatttagtgtctgttgagggcccgtttcctcatggagagctgtcttctagctgtaccctcacatgagtgaagggataagagagctcgctgggatctctcttgtaaaggcacccgtcccatctatgaggactctgccctcaacacctaatcacctaccaaaggccccacctgtcaataccatcatagtgtggggttaggatttcaacatatcaattctgtggggacacaaaaagttggtccatagcacctacgtattctacatttggattaaaaagacccttctcaaatattcttttgtaagatagaaaatgattctcttctctagattaaaaaacgaaaggaacagtataaagcacaactacccaaagaaatttgaaatacaataatgactcccagaacaagatcagatcaccactgcagacttatcaataaatgtaaagagacaatgctttaaaaagcagtataagagagaaaaatctacatatacactcaaaatggacatgcagactgaatatgacaaataagagagagattaaagtagtacttttcctcatctggataaaatatcacacagggctatcagctgcttttgtccccatcccttattcaccaaacaacattctaattgctaatatgatttcctaagaacccccgaacctataaaggtacttctaaaatgtaatgcttcttcttatatattaaagttcttttccttacatattaaaatttagtggctatttacttccaaaataaaaaacaccatatttcctcaacaatatacattttctttaatatctgctactagaaattttgctcatctgcagaagccttggggctggcgatagagaacaggctgtaagtaatccctctgtgaatgcaacacagtaattagccttttttttcttatggtgtgccctttagctgtttgttttttttttcagcatcaactgagagtttttaggaactagcttgaggaagagatgtctcttatactaggggcacacttggaaatttgaaattattaatatccccaatacacagctgcattaggatttaagtaaaataattatctcatcaaataacattataattgtcactaatgctatctacattgccaacttgaaaataaaatgtttatatgccattaacataggacaatagtggaggaaagtttctgggtgaccagctggtgtactaactacatgagggcggactcccacattaatcctgcgggacaccatggatttgcagtctgctctggaaatttccttctctcacaatgaattgcaaaagatatgcaagacctcaagagaactagaaaatagatcatgtgcaaacagatgaaaacatttctccagccaagcaaatattgatactgttagaatcagacctacagttactatgtgactattaatttcaaagaaaggtcaagttgcagatctcaacaacatcagtaaggcaagaatggaaaagaagtttgaaaataatcataggaaaatgccacaagtaatttccttttttgggaaatcagtccaagtattaattttaaaaacaaaaacatgaaagactgtggttaagcaattgtaacttctagcatgtcataatgttaataagaccatagaggcatagctactaaatattgtagccaagttccagaaaatacacaaaagtatctattaaataaccttatattattcttcaaatagaacatggcatgtaaagtgaagaaaagttgtctgtaatcccagcgtaaatacaccgtgcaatcaaagttaaatgcatgcattatttagtatatataggaagttaataggaaaattccaaaaaataaaacagagttagttatattttgacataagctttgggatttccagattttaataatcatctgtagcctctaaagataaggaatttgtttgatttactgaacgtacattattttaaatttcattaaatagataaatggttgatttttaaagaccaaataagtactcatgaaagagaaacattttggctctgggccataggaaatagaaatttcatcaggaaagaaccatggagggattgtctgtccctctctagtgccaaagcaaggggattgtacaaataacagggcctggcattctggaaaggaagggtgaatatgtaggacccagggcccaaaaatgttacgtttgtaaaaattgcatgtaaagaacattaatcatattttccccagtttttctctagggccctagtctgctcttgaagccctactccttaaactctcccagagcaggaggaatgacttatgtgaatgataaggcatgcaagtggtcacatgcatctgccatggagggcagaatggtaatccagcttaccggtttttatgtagtcagcatccctgggcaggtttctccagccatggaggagacggaaatcttgccaaccctcagcttcacctgcaactgagtgggttcaactgccttcttcgaattgatgtttgtgtgtgtggttggtggaagggaaagggtggctaggaaatctcagtagcatctttaataaagccaataaatgtccacttcttaactataatagacaagttttaaaagagaagaagatagtaagctacttaaagctagatagccatcctatctttttggccttctttgtgcttagcattctctttataacacagtgacctcaacaaaatagatgttcaattaatgatgttgaatatatgaagagagtcttgtgagagctgcaagagacagtacttactgattaattgttttgatatttaagaaccactttggttgaagaatattattggggcaaggaaatgagaataaatgtattccctggaaataatctttggaagtttgtttactaaaagagaaagaatatcttagggaatttctgaacttgtgctacttttactacatgtgattcaagctaggcgatctttgggaatgcaaatatttgccatatattttaaagaaacatcctcaagaataaatgaagcagatttacggaggcatacaaagagttttaaaaaaataattatactggaattatttttaggaaaaaatgataaaaaatttccttttacttgatttacctagattacctcaaataaccaaatacaaaaaatattcccaaagcaaattgtctctcttaatgctcttacacatttcaccattttatgtttttacccatcattgctttgtgaactttattttcatttctatcaaaatgtatccatttaatcaaaggaattcaatcaaaagttatttcagactgactttaaatgatgatcacgagaagcacatagcacagttggttacattagaagatgaaaaaatgctcataatccctttcatctgaactcttaccttaccttaattataccaaagattgtaaacagatccttcattgactggtatgtgttaatattcctactaaagattttaaattattttaaatgcttactgcattatatggtttggctctgtgtccccacccaaatctcaccttgaattttaataatctccatgtgtcaaagtgggaacaggtggaggtaatttaatcatgggagtgtttttcccaatgctgttctcgtgataatgagtgagtctcatgagatctgatggttttataaatgtctggcgtttctcgtgcttgcactcattctttctcctgctgccctgtgaagaggtgctttatgccatgattgtaagtttccagaggccttcccagacatgtggaactgtgagtcaattaaacctctttttctttataaattacccagtctcaggtatttcttcatagcagcctaatacactgcattaattttctattgctaaataacaaataaccatatacttatcaatataagacaatacccatttattggctcacaaatctgtaagtcattatttatgttgcactccattggattctctgatcggaatctcacaagatcaaaaagaaaatgtcggctgggatgaacacttatttgaaggctttcgggaagaattcacttccaagctcattctggttgttggcagaattctgtatcttgtgaatgtgagattgaggtccccattttctggctagcttaccagccccagactgtgctcagatcctagaggctgaagatatagccccctgtatcttcaaagccagcaaagatctgtggtatccttcttgtattttcctctttctgattccgtggttagattgagcccatctagataatcacctttgggcacataacagtcacaggagtaatacgtcattatattgacaaattccactcacattcaaaggggaggggttacacaaggaagacagccaagagaagtcatttttagaattctgtctaccatacttaccaacatttaaacatcagggtattttatatagatatccaaaaattttgtttttcttaaaaatgaggctatctgtcaatgttgggctacattccaccattgcaacaattggctagacctgataagtgacagtccctttgttccgaggagcattctcaagtagagtttgcaattcgctgttaacacacactcacccagttcactctctacgtacttcagttttcagcaacagccttacagtataaacgatactgcaacacaacatttctaacagagcacatattcacacctcttcaaatctaaatttatccaggaaactaatcatctcaatgatatctgcacttcgaagataatgagaaaatctcaggctaagcactgatgttccttttgcctctcaagacgaattcttgtaataacatttcaataaacttagtaatgccgagcatgtacttagtcttttggtctaataagtgaataatattgcacaaattaaatcctaccactgagttagcccattcaaaagacacaaacgtactctcagtggataaatgtcttcccgtgtaatcatgccagcagcagaaaatggaatctgtcataaaaaataaattatccaagagtctgaccatgtccacacagcttggcactaaatttcatttttcttgttcttcagctgagaacctaaatacacacttataaagcagtcagaaagattacgttgtttgtcaaagttggattctacagcctcagcattcagatgtatgagactgtagcattcggaaggcctgctgctttttatgtgtcggtttactgtgatcgcacctgtagttagttaggttttccagtttcaggagacataaaggtgcagagagaggcagcacaaagcctgcaggctcatttcttagggaactatgaggggagatgctggggtttataaaaattgaagtaatgggatttgataaagattgttgtgggctagactgtgggagccttccatgtcagggtaagacatttggaaattatctcacagtgaggaggcaactgtttcatttagagcagcagaagaatacaacagttagaagtacagcctttggagccagactatgtggtttcaaaccttaccgctatggtatgagtgtttgtgttccttcaaaatttatgtcgaatcttaatctccagtgcagtagtattaagaggtggggcctttggagctagttaagtcacggagtggagctctcatgaaagggattagtgaatttataaatttgtctggaggcgactagtgttcgtttccttttgctttctggacacagccttcatcccctttggaggatgcagcaaccaggtgccatcttgaaagcagagaccaggtccttactagacaccaaacctgctggcaccttgatctttaacttcccatgttccagaattatgagaaatatatttctattgttcctaaattttttctttaaccccaatttactttgtggacctagacaaagttgataaatctaccagcgactttccaattaaaaggacgatattagtggctatgaactgaatgtttgtgtcctctgcaaatttattcgctaaatccctgacccccaatataactgtatttggaggtagggtctttatggaggtaattaagcataaatgaagtaataagtgtggggtcctgatccaatagcattagtgtcactataagaaaagagaccagagctctctgtctctctgcacttgccagaatgttgatcttgtcatcccagcctccagaactgtgagaaataaatttctgttcttttagccaaaaaataaaataaaattacccactttatggtattttgtcatagtagcacaaatggacaaagatgctgcctctgccactcgctagctatatgacaggaagccagttagtttgataccatgtcttcacatcttcatataaagtgagaagtgtaacagacacatgctaatataattcaccacttagaacagtgctgatgcctagtaaccatccaagaaatgttagctatcattattactgtagaaaccaggttagcgctgacattgaggtaaataaatatatgaataaatgataaaccctaaataaaagttgtcgaaagatagaaaacacaatttatatcctttttagtaggtacataagatccctccattgcgaggaagagtcacacttgagttctcagttaattagactttgttttaaacctagttttcttccttgtcactcagggctaatcacacaaggcttactgccttataggtcttcatctctaggcttctgctctctctactcatttatttccttactaagtgtttcacagttaaatttcctagaaaaaaaaaaaaaagagtgcaaggggttttctcagtcaccattaactctggatcccttagcctggactgtgtttctgccaagccacttctcagattcctgctcatcctgcagatggctgcctttatgtcagacaccagttcctggtccagtcacctatgtctggagtagcagagaaaataatcatatatgtagatcccccttctctctaactgccatgaaaggttgtggattagtagattattttgctgtttctactgctcttatggtcattggtgctttgggctctggtgacgaagagtctgtgcgtgaagaagcagaaaggacaacagttccgttgccaaattcttcagcaagagtggggagaaaagcatagctaatatacttctgagcagttacaggcccaaagaaaaacgtgtgaaagcacacatggtgggtggagtgggagaggcggagaaagtggggcatggaatggtggagagaatgcaaagcattctttcctcagaatgatgagaggctctggggcgtttccttggtatttggaattttagtaagaattcatgtcaactatgtacttgaatcacctttattattttttgagagatcaagtaaagattgtaaacatcattcaaactgtgcttccctgattgtaccacttccctgagcataactatgtggggcacatcttaagcaggaatatagaagagactgtcaaagaggagtttgggcatggctgtcactctgaggtttcctaaaaaagagaagtttaactggaatttccggaaatagatactggaattccaaacaacttgctggttgttttaccttctttgtgagcttaatatctacccaatttcttaggaaagaggaaaagtttcaaatgatgagactataatgtcaaattgcacttgggaacttataaatagatttttgaaatgctatgtctttttaaaatcaagaaaatttaaagtagatacttacatttagattgcatttggtttctaaatgtgctctcaagagataatacattagaatatatagttttcctaggcactggagagctgcaattaaaacattggttccagactaagactgaaataagttcaaatgcaggcttttccacttattagttccattgctctagataagttaacatgtctatggtggatttaaattatgcacacaaattctctaatattcttgccttcaagagatggagcctaattcctctcctcttgagagtaggttggacgtagtgacttgtttctagtaaagaaagtgacaggatgtgaatttagagacaatatcttaaaaagcacgttgacttcctttcttggatggcacactctggaggaagcttggattacatgctctaggggaagctagctgccatgttgtgaggtcacactgaacagcctcatagagaaatccacctggcaaggaaatgaggtctcctgcaacagccagcaatgaactgaggccttctgccagcaatcctgtgagtgagccattttagagttaatccttcagccacagtcaagccttcagattgctgttagcccacacaaacatcttggctgcagcttcatgagagaccctgagtcagactcacccagctaagctgctaccaaattcatgacctatggaaactgtgtgagctaataaatgcttgttgttctaagttactaacttgtgttaatttctattataccatgttattttagtactattttggaaagccaggatttaatgagggtttaataaaaaatacagcagtgctgactattccagtagccactgaccctatgtagctatttaaatttagtcaaaattaaataaaattaaatattcaatttgtcagttgcattagctgcatttgaaggaactctgtagccatatgtggttagcactgtattggatagtgcagatatagaacattttcattagttcagaaagtttttcttttctttctttatttttatttatctacttttagagacagggatagctctgtcatccaggctggagtggcacaacatagctcactacaaccttgaactcctgggctcaagcaatcctccctcctaagccctccaagtaattgacacacgtgccaccatatctggctaattaaaaaaatatattttttttagagacaggattttactatgttgctcaggctggtctagacctcctggcctcatgtaattcttccgcctcaaccttcttaatacctataattacaggcataagccactgtacccggctgattgcaggaagttccgttagacaacattgctctgtagcaatgtagtttaaattggagcctgcaaatgcaaatactaaacatgaataatttttgaatgttgtaaatttttgaatttaagtatttaagatttttttaaaaaataaacatactctggatcatttggacaaccatcttaaaaccaagttttgctaattgatttctgtgctcgattttagaccttgaatttttatgtttatgatggagttccaggcagactgtgctactcttaagtgttgagggctattgttaaaaggacagagtcaaaatcatgcataaacaataggtgattaaaatgtgtgtgatgaattcagtccacggtgtcaagcatgctctctgagtgaaaactcagtagtggaaaaattcactcatcacatgactcattaagcattcaacaattcactttaagcaagacaatattctctttatgttaaatttatactcttcatttgactagtctcaattttataattttactggtatttgtaattgcctttgatcttatagatgcatagtggttataaatacaaatacacttttaaggttatacatgcctcagtatataataattctatacataattctctcatgccaccttatttgaattgggaaactttacaaagaagaaacctggggagaataccccaaatttgccatctgcagtgaaattaaccattacagataaggatcaggcctacaaaggaagtcgagtttcaccttcagttaacagacttgtattttaacctgggtcttcaaagaaaagaacgcctaaatctgaaagatcttgttggaggaaatttctttcacattgacacacggatgaaacaggtatttcaaaatggaggaacttcttgcacttcacagcatacccagtaggtggcctcacctacacttttgccaatgcatgtgaatgtaagtgcttctttgatgatgcatttcattatctctgtgagacacctaactattgagaagaacaggcttctaaacagagaaaggcttttgatgaatgcagtagaattatattaagtaatcggcatatcttttgttatgttgattgtgtcctgatttttatttgaatccggtgaaaagtaaaaaggtctgaatttctccctcagctatgcacgtgttaattctttccaacagcacacagagctaagtcaaccctttctgagtaaaacagcttggctttgagacctgctgttttctccagcttcctcttttcctgtgtcatggagtggccttgagaaatgcctctccctgttattgatgggaacaacccaacagcttttagtaactgccaatctcacttactcttttccttcttttctccctcaggtccatttccttccactctgtcttgtcacctccccctattctgcattctttatccttgcttcatttcttttttgctttaattacactaagctgtaaatattttttagttctctgagactctcttcacgtttttcatcctgaaagtgttgcaattagcttttttactgactgctactgacttcccattgatggcatttacttaaatggtaatgttatctttgtgacatatgcattcaaagaagaaacagggcttgccttcatatgtctgaataaaggaagtgcctattttctcactagattattttctgaatatcagaataaattagatctcattgaaacataatgtatttctcaaaggaacaattttatgactggggaagtcacataatctgacaatgaacatttagttaggtataacaaattgcgtcacatccctggtcaagtgcttacctaccttgtaagagttagaacaaatacacctgattatttggggacacccaagaagaaatgaaattttactgtactttatatactatctcattctagttcttttaaaatattattttgtatgtatgttgcaacactcacaattgcaatagaaacactcagagtgtttctagattaatcacttagcacagtgacttctaccttgattgtaatttaaaatagtaaagttaggtgacagtgctctaaatggccacaattgcatcatacttgtttctgtacaaagctctttcctatttcttaaaatgttaaaaaataaaactctgtccatttgtatagaattgggtcattaagtaatgaacgacctattgaaatctcatatgttagctaaaataaacatcaatttaaaattatcagactggtctcgaactcctgacctcaggagaccaggctgaccaacatggtgaaaccctgtctctactaaatacaaaaaattagctgtgcatggtggcacatgcctataatcccagctacttgggaggctgaggcaacagaatcccttgaacctgggaggtggagtttgcagtgagctgagattgcaccattcactccagcctgggcaccaagagttaaactctgtcttaaaaaataaataaataaaattataaaattatcagattatattttccttgatatttaaaatatggaaggtttattttaaaagggtttatctttttgttgttgatttctttttaaagaagtatgcagggaagtttatatagataatttcctcataaccaatattcaaaatcctttcatggatcctttagtgacattcacatctgttctcaagctattcaaaataattcctgaaagactggatagattattattttaatagttaatgtaagtatttcaatgccttttagcaatgaacactcttaccttttgcagttaaattgatattcaatttattagagttacaaattcaataatcacatttgccttaggttttcaagctatgttttataaatcttatgtcattcaaaaatctaaatacattttatttgaaaaagaacagtcacttatactcttttacttactctttatgaaacaggaaaatagggtgaagaggcagggaaaatagggtgaggaggcaggaaaatagggtgaagaggcagggaaaatagggtgaggaggcaggaaaatagggtgaggagctaaggtggattcacacttcagctaggacaggaaatatcctctccatagggcgtaggctgtaaatgactttgtaactttacttcattctctccatttacgtagggtgtaccccaactaaccaatggaatcctctagagggtatttaaactcccagaaattctgtaacagggcctttgagccccactatgctcaggcccgctcccacactgtgaagtgtgctttcattttcaatagatcccttcattccttccttgctttgtttgtgagttttgtccaattctttgttcaagatgccaagaacctagacaccctttaccattaacatttaattaacatttgatcagctcaa

SEQ ID NO: 5684 - DNA, 116687 bp, Homo sapiens
  ARK5 gene - 104959592 - 105036278 of chr12; NCBI Entrez Gene ID: 9891; Build 35; sequence includes 20,000 bases upstream of initiation codon and 20,000 bases downstream of termination codon of the gene
gaaggactccactcatccagcctgggagacagtgtgcaggggagccagaggcagtaaagcatagtggttcggggcatggtttcctacaatgttgcccatgttggaatctggctctgatactagttatctgacctgggtcaagtcacttgacctctctgtgcctcagttccttcatctttaatttgtggatgttaaaaatagtagtgcctacttatagtgtttacatgaatttaattaattaattaattataattattataattgagacagggtctcactctgttgtccaggctggagtgtagtggcacagtcatagctcactgtagcttcaaactcctgggctgaagggatcttccctcctcagcctcctgagtagctgggactacaggcatgtgccaccatgcctggctaattttttttttagaggtcttgctattttggccaggctggtcttgaactcctgacttcaagcaattctcctgcctcaccctcccaatgcactgagattagagacataagccactgtgcccaggctgcattaattttaaattaacaaatatttgaaaaacacttatgacagtgacttaacacatagtaagcattaaatgagtgttagttattattattattattttttattactattattcaagaatgagtagatgttagccagatggagcctgacaggggttagtgcattctaagtattggggggtttggtgaaaccttagtcagttctcccctccttcatactgtaacacaactgagaaatggacacaggaatcagaggtgaaaggatcagttccatgctggtaaaggtggatctcagcttgggtctctctgaagttggtatggtcttcctgctcctttgccctattaatagactgacttaccttttgttgggggctaagtcctgccctggtgaacttatcatagggcacagggaaaggagaaaataggcaggcaggtttctagggagagacctcacgtgggacagtcccctcttccatctccccacttggatagcgagaaattgttgagagaggaaacaatctcttaatattgttctctcctgaatggtgatcccatggaaacagaagtggagtagattgtattattgcatttcagatattcactgtccctcccactttgcagtgtaaggggtacacactcttgcctcattggtctttggccccctaatgtgacttgccctcagcaatgcaatggaacagagttgatgtataccagatctggtcagaggcttgacatgtgctctcgtggttggcttggcctgttgagcgtctacctccatcatgagctcaacctgccccagagagtggcttctcttccagcctgggtcctgcaatttgtagacaaaaagctcacacttgaactggcgccaaacccagctacacccagcagagccacagaagactggtgaacccacatttgagaaataatttcttatcataaacccctgagatttcggaggttggttgttaccacaggaaaagataacttttaacggcaaagattatttttaatggcaaaaactgcattacttttgcaccaacctaatactaaaggtgagtaattggcatgttccttgaccgttaaatgagaaaagggcatgagcgaagtcagagaggcatggagagaagctgcaagctgtcagggctgctggagcatcaccgtggactggaagatagatggagagtaggcaggggacaggctaagaaggatgggtcctgtggtcaaggcctgtgaactttaacaccaaagaaatggaagacattgaagagttttaagcataggggtgacttgaataagatgtgaactttaactcatccaggagttgttgtagtgcaatgcattactcacatatctctggtgatgctggtgtaaacaaagcactgtactgccagtcatatagaagtccggcacctacaaggatgcacagtagataatgcttcataatgataataaatgaccatgttatgggtgcatgcatttagtatactgtactttctgttgttattttagagtgcattccttctacttataaaaagaagaagttagctgtaaaacagccccagggaggtcattccagaagaaggcattgttatcataagagatgactgcccaatgtgtgttattacccctgaagtccttccagcggggcaagatgtggaggtggaagatggtgatattgatgattctgactgtgtaggactaggccaatgtgtgcgtttgtatagtttttagcaaaaaaagtttaaaaaataaaaataaaaaaatttaaaaaatggaaaagcttatagaataaggatataaagaaagaaaatatttatatacagttgcacaatgtattttaagctaagtgttattacatgagtcataaagttgaaaacattaaaaagtttataaagtaaaaaggttactaagctttattatcaaagatcattgatcgaagaaagaaaaacattttaaaaagaaatttagtgtagcttaagtgtacagtatttctaaagtctgcagtcgtatccagtactgttctcaaccttcatcttcactcaccactcactcgctgactcacccaaagcaattccagtcctgctccactcatgggaagtgccctatacaggggtaccattttctaatcttacatactgtatttttactgtatcttttttatgtttagatatatttagatacaagaatacttcccattgtgttagaattgcctgcagtattcagtacagttacgtgctgtaaaggtttgtaatccaggaacaataggctctacgcaagctgtcaacacgtggcccacaggctgcatgtggcccaggacagctttgaatactgcccaacacaaatgtgtaaactttcttaaaacattatgagaatttttttgcaattttttttttttttttagctcatcagctatcgttagtgttagtgtattgtattttatgtgtggccaaagacaagttttcctccaatgtggcctacggaagccgaaagattgaacacccctgctctactgtatagccttggtttggagtagccgacaccatctaggtttatgtaagcatactctgatgttcacacaatgaaattaccaaatgatgaatttccccgaatgtacccctgtcattagttgatgcatgactataatcataaaagatccagagatacatttgggctttctgaaaagaagtgagatggtggagactcaactcccatttcaagtattaggtggaacttaggcggcctaggccagattggaatttaggagcttggtttcctgaatcttgtctttcccagatgtgtccattgaaagagaaaagagaggtgagaccagctttccccgtcaagctgtgaagtatgtctactgagagaaggccactggacacagaatgacagaagctgagcctgtggcttggtcctgccacttgcttagctttactgcatctcatgatattatttgcaactctgcttgcaagtgtaacaaacacctatttgagctagggaagctcaacatgggggatttgctgtaaaaatatagagatggtttgcagaatttaaggaaagagatacagctgaacctttgggtaagactgggatcagggttgtaaaagccatcggggaccatacagcttctctctgctcatctgcttcaatctctgtttatagactgactttttctgcttcttggtccacagctctggagcttacatcacctctactcaagtcatcagctcagaccaaactagaatcacttaatcctcattgcaaatagacatagaaaaaggactctgacccattttgggttaattgttcactctggtggccatcaggtcaaggtcagggggcacatatttaattaggggagctcatacttattggtgaagtgggaggacaagggcactgctgtagcctgggtagttatcccaaattttatctgtggggtatcttagaacacaagttcactggtttaacagagacttcaaatacagtggtttaaataggaagtatattcctcttgtaacagtccagtgataagaaatgtaggattgagaggccgggcgcggtggctcacgcctgtaatcccagcactttgggaggctgagacgggcggatcatgaggtcaggagatcgagaccatcctagctaacacggtgaaccccatctctactaaaaatacaaaaaaaaaattagccgggcgtggtggccggtacctgtagtcccagctacttgggaggctgaggcaggagaatggcgtgaacctgggaggcggagcttgcagtgagccgagatcgtgccactgcactccagcctgggcgacagagcaagactctgtctcaaaacaaacaaacaaacaaacaaaaaaacagaaatgtaggattgagagattaaagccacaatgccagcacactgggccgtactgatggtggagtcttattttgatgtccaccatccctaggctttcaccctcatctctgatgttcattatggttctccatggttctccatcagattcaccttctgggtagcaagataggggaaggggaagagagagggaaggccattctctttaagggcatgactcagaagttggccagatctttttgtttataatagaacttagttacatgtataagagaacttagttacatataaggaaggctgggaaatatagtctctattctgggtggccataatctcagttaaaaattgggagttctgctactaccgaagaaagggagaagcagattaaatggtgtggctaaatggtgcgggccaactgaaaatcctcctgcagtgtaatatttcctacaaattgttctgaggatcaaatgacctggtcagggcaggcgaaaatggaaagcacaatataactgttcacctcagcctccctcagttttatgagccatgaaaccttcttgtgaatagttttcagtctggttttggaattaaaagccttatattagagttggcagggctttaccatttattatttgtgtgccctggggtgagtaatttcacctttctggtatcagtttcctcaaagataaaattgggctaacaatagtggctacctcaagggtgttgggaagattaattaagataacatatgccgaggacttattactaatctggcatatagttagtgttcaacatgttatcatgatttatggtcccaccttgaggttagagctcagattccaactgacttttggcttttatcagaaataaaatctctgagaacccttcttggttgcctcccagcagccatcctcaatctttcttctctccctgcctttcacttcagagactgaatgtgccaggtactcagcctgctttgcagctaagggtagctaggtgatggggtgtttagggaggtatttccatctgacataaaaggagagaaagacacatgaagggagctgcccttttcccctggctgagcctctacttcattccttcttacttccttcaaaaataatagtacgagagtgtgatatctggaacaaaggcaaccatctgtgattactgggtcacaacccaatggattctagaaagctaaatggtagagaagaatagaaagagcctggatctttgatgactttgtcgagctgctgagccaaccttggaactattaaccccagtcatcttgccatgtgagataataacattttcactgtttttttttttgtcgttgttgttttttttttgagacacagtctcactctgtcacccaggctggagtgcgatggcacgatctcagctcactgcaacgtctgcctcctgggttcaagcgattctcctgcctcagcctcctgagtagctgggactacaggtgtgtgccaccatgcccagctaatttttgtatttttagtagaaacggggtttcaccatgttggccaggctggtcttgaactcctgacctcaggtgatgcgcctcagcctcccaaagtgctgggattagaggtgtgagccaccgcgcctggccacattttcgttatttaaggcacatttacttagttgttttctttcttgtcactaaaaggattctcatataaatcctcccattaggagaggaaaatgcactctcactaaagctgttcaaaagaatgtgccacccactaaaaaggctgtttccccaaaagggcacagcaagtgcgccacctcttatggtgacttccctgaaatggacaccattcattttgtatgtatgcattctgatatatttatttttaaaaaaaaaaacagtctcgttccttcatagttacaattctgggcttcggctcagctaagttcaatatttacttatcaccagctatatcaagaacagtaatagtgccaatgacgcacagtaaagaagagacccagacgctgccttcaaagagcttgtagtctagaggggagaagaaatagataaacagaggatcccaacacacaatggaaagagctatgatggtatggaaggacaaagaagaggaactcagccataaggcaggggggaaagtggggagcaaagcaaaccaggaaagagaatatttattgaacacctaccatgggtgtgttaactgtatgtgtatgtgatttttaactagaagtctcacttctggcaccaatgtatcagcacaggaggtctgtctgtctcccagcaaggaccatcatcagcattttaaggtagcctaatctacacatccatacaaaatagaaagataggtgggggtaaatagagtcagcaggcactaattaacatatctaggatcaacatatttggccttgcttattcgcatatagccagtcagagcaagagggtgaacagcaacaccccaaagaaaccaatcacaaaaaggagttcctcaggacaaagcccaaggaccctgagggcagatggctagatggcagggactgtactgtgcttcctcattctgttttcccactttcctaagtaacttgtggagctctttgtctagaggctctgggtcatgctcggataagaactcttctcctagatccaacctatggtgatggctgagatgaaggctgaggtgacacagcattcattcctacagatgaatgattcctacaggtacctccttggacattctggcttcctaataatgcccaggagaaccatgatatcacattgtttgtgtccaatttacggatgaacaatgtgaatcccaacagcctacattatcaatagaaatttggaatttgagccaagagataaggccttttatcgccaaagaatttatgtgtgtgcattaatgggaaggtttagtcgagacagtttagataattttatattagatgattcttttgttattaaatactcctaattttgtgtatgtgtgtgtgtgcatgtatgtgtgtgtgtgtaatctgaaaaggcttcctccgatgggtttctacctatgacagagccagtggagtgcatgaagcacagctcactgtaaccttagacccctgaaagtttggcaggtgctcataaatgggaactgtgccagatgcttctgctgaaggaacaaggatggatttgtggagtatgtcagtgtcttctgcagcctgcaggtttcactcaggggccagagccacagtcgaggctggactctacaaattcaggataacaccctcagaggacaaggtcacccgtggtcacactgccatatgcctctaatttgcaaaggtgatgggaagttcccatttcatctgcattgacacttgtcaagctcatctgactatgcctcaaattccacaattagaatttcatccttttggctaaagccaaacaggaaatctgtgtcttattcaaggacatttctacctggagagtgagactttatgcttaatagccacaaatgtgacgttctcacatcccctcctctcactggatgcccttgatagctcagtaatataggtttgacgattttacctgtttacctgatgagcaaacagaggcccaaatggaagccaaaatgtaaactcttggctcgaattccagatttctatggataatgtaggctgttgggactcacattgttcatctgtaaatcggacacaagaatgtgatatcatggttctcctgggcgttatcaggaagccagaatgaggcacactgctcttttgcttgttagctcatttgttcgttcattcattcacattcagcaagtggttctttgcagtcttgatctaagggacaaagggctaccaagatgcctaagcagaacctgctaccctaactcccctttaactgagcccttattattttccagacaccaggcatattttaatataatcttccccaaataactatatttgttaggcattcttcccatcttgtagatgcagaaactgagacccagagaagttaagcaagttacctaaagtcacgcagctagaaatggagggagctggagtttgacccagatcagactacaagagctttcattctcaatattacacagcctctctcacattggaatttctctgtgttttattcccttcaactttggctggacttattttagatggatgtagctggattctaaggggctacactggatactaaagtctgagccagcaggtaggccaatgacccaagtattttggtgagagctactgggacatttaggtaaaagtgtttatctaaattttctctggaaaattgctgtatctgtgctgtggccaggtgtggaccgagtgggctgctcaccggctcctgcctcagcagtaggtctttgcttctcttctagaactgccctagggactactcatccactctattttttaaaattatttttatttttattatttttttgagagggagtcccgctctgtctcccaggctagcctggagtgcaatggcgaaatctcagctcactgcagcttccacctcctgggttcaagtgattctcatgactcagcctcccaagtagctgggattacaggcacaagccaccacatccggctaattttttatatttttggtagaaacggggtttcaccaaattggccaggctggtctcaaactcctgacctcaagtgatccaccagcctcggcctctcaaagtgctgggattacaggagtgagccaccccacctggcctctcattcactctgtcagtacagagattggtccctatggccagagtccactcatcacctgctctctgtctgctatgagtggctggtaccacctctgaagtttgccagctggtaacgtgaaaagccaggggtgagagcgaagtgcaaggctggaggggactactggatagcgatagcaatcccccaaggacacattaatttctctaaatgacctttccagcataatgaaggtacagagaatccaatcagttgccctttcgaaagaacagtgagacagctgctctttttgaaaaagcgggactccaagctgaagccaggctggatttctttgtgctgtcctttctctggctcacgaaattctaccttggaggctgaaaactcatggcattcagtttcattttaaaaaggagattggaaccctgaaactaagtatctacaaattattttagaagtggctttcacaaagatgctctcttttttttttcattttgatgatgtctctacattggagggtatggagggtatcattatccccattttctagatggggaaactaaggccaggagagactgtgtgatgtgatgggaaatgttgggaaattgagactataagctggctctagtctgataaataatagacacaacatgtagagcccttcgcagctgacaaagtatttgcatgttttaaactttttaatccatccatccaacaaacccagtaagacattttattattatccctggtcttacagatcagttagtgacagacctggccttctaactccttcccatccttctgttctctttccatcgtattacttcttcttgggttctttgacttctttgagtctctattctaggagctggtatttttttctgtaaagagccagatagtaaatattttaggctttgatggccatatgatctctgttgaaactactcagttctgcccttctagctcaaaagcagccatagatgtacgtaaaaaaatggatgttactgtgttcaaataaatctatatttatggccctgaaatctgaatttcatataattttcatgaatcatgaaatattattattatttgattttcaaaagcaactcaaaagtgtaaaaaccattcttagcttgtgtatggcacaaaaacaggcagggggccatagcgtgctgactctcgccctatctttgtctgtaaaattgggaagtagtaatacatccgccgtagactcacatggattaagtaagatcacaccagtaccatgttttgcacagggtccaccattgcccttctgtcacacgatgagagcatgaacgtctctgggtttcagttctcttatctattagaagggaagtgttggctacttctagctctgagtctatatatttttgccaaattactttttgctaaagagcttcaaccgccttccttctccctgccctgaggacatccatgcctcctgggtctccccagaatttctccaccccatttccatttggccaacttctctttcttggtcctagtcgttattttgtaccttggcttgcactgaagtgaactagatttcttctccatttcttggagaagttttcagtgggcagacccagccacttggtggagctgtggggagatgtttttccttataaagctacctgatgtttcccctggagaacttcaggtttgaaggtagggacgctggaaatggtgcttctgggggaaagaggtgttgttcatacctgtgtgcgtgtttccagcatctgtccatatccagttaatttgggcagtcagggttttgagttcagatgtttcaagagtcctgagtggggcatttatatgggagaggccagggacagatagatcctagatctggcgaggttctcaatccgaattcctggaagtttcccagttgtcccttgttctgtcatggaggaaatcagtctgtctcctcaccatgcaaaacatgcactttctttttggagccattagatgtacaatcgaatagcctttatcttttaaggagctgactttttgtgacttttatatatgtaaaacatgcaatttctttttggagccattagatatacagtcaaatagactttatctttcaaggagctgactttttgtgacttttatataacaactattggtgagatgtgatttcttctccctttcttggagaagtttttggttgctcagatattagctattatgtagccaaattacctgagcttgtaagttgcgagaccatagggtagtctctcgatctcttagcatatcccatgaaaaacgtgggaaataaaaatatctaatcccaagtaaagtatcattttgagaattaaaaaagaccacttgtgggaaagtgttttgtaaactgtaaagcatcatgctgatgggaggtattagaaactcctcgagggcagaggaccatcttgtattactctttatctgcagaatgactgcagcatcatagatgctcagctaacatctgttgaatgaatgagtgaacaggcgaatgaagagcatcacgaaggggttggcagactggaaatatgcctattaaattaagggtttcaaaggatgaggctgggagaagcaggagaagcaggcccttgagaggaatctagggcacgtggcttgtctgccaggaaggcagctaatgcatcccttgccagctagccggctgccgggcaggctggctccactgggcgagctgccaggccccaggccatctaaggcttgtgtgagcgtcccagagcaggtgggccgggagcgtctgtcgtcacgggtgggctggtgacccgcctggaatgccttccctctcgtgcctgcttttagagccttagtccctggtgacagtaaacagaatggacgcagggcctgacactgagccaccctgggtcttggcagggtgggtctgagagacctgttttccagagttaaaagaatacaaataaacacagcacagataaatgtaggcagttatataggaaatctaggtcccagggctattttttcctgacccagtttttttgtttgtttgtttgggacataattacttgggaaatggtaattgttttacatgcttgctatagacctgatagaataaatctaataataatattatttaaacaataataatagcagctaatgttttgtctgtgtttaccacgtgcctatgtagtactatgttaaacacttcatagacattttcatagttctacaaggtaatcattaactctgtaggattgtatcctgtcaatcctatgtactaagtattattactatacctattttacgtatggagggattgaggttcagtcacttcctggggtcacagagctgaatggtggaagagctgctagaactcaactcaaaccattcatccacccattcattcattacataatgattgagcacctactatatagcaggtactagggattcatgtgtgaataataccaataaaaactcctgctatgtggggacaaacacaacaaataaagaaattttataatatattatatggtggtaaatgcaatggtgaagaataaagcatccagggaaggaaagcagcgccaatagcagaatgggaggtggagaaggtgggctgcaattgtagacaggatggtcaggaaaggccccatggtgagggtgacatctgagcagagttgaaggtactgggttgctgaactgtgtggattggaaagtagaactttgttttgtatgaactttgcccaatggggcaaacaggcaaattggagtccaaggaagatttctgtgaattcactttttttcttaagttcattctcactctcttttctgggctatgcatttccagaataggaaattgaatggcaaactagggagaaagtaaaggcatcaaataaattcatcgatcaatccgtccatccatccgtccatccattcatccatccatctacccacccatccatccatacatctgttcaacattcctaaggcacccactacaagccagacctatgcttctcttagaagaataagatctagctctatactgttggatatataaaatatatataaaataaatatatatgtataaaataaatataagtaatgttatataattttatataatcaactgtaaatatattttacactgcttcagattttttaaatttaaattttcaaatgaaaattttattaaatacaactttattgttttgctagagttgcatttcagtttaatcattgaaaatttatctctgaattgagaatactctaagtgtgaaatgcataatgaattttgaagattgagcacagaaaaatgtaaaatatcttatcagtgagttgtttatattaattacatattgaaattaaactattccaaatattttattgttactatttattttatagtaatacagtaatatgtttattactatttcgaatattatattattaaagttaatttctcttgtttttgacttgtttttaacatggctgccaggaaagttaaaattatttatgtggctcgcgttatatttctattggatagtgctgttctagaccttgccattccggagcttccaggcaactgcagggagctgggcacacaattgagtaattgtaataccatgtggtaagtgctataatagacccaggaaccgagtgctctggggacagaggagaactgagccttcagttctgcccagcccaggatcaggggagaggtgacgtcctcagctaggtctctgagatggtagaagtttgtcatctggaggccaggaaatgaggggtcccaggaattgggtatagcatgtgcaaaggccaagagacatgaaaccctgagaaccatgaagggaaaggaatgtgtgcattattcagcaagagaaaggaccccaccctgcccagaaccctatttaacctcagtgaaagcctaagcctcttccattgtagccaattagagtttttctcccacccgaccccagcacgtccctgcacgtgacatttttactcttgcgactttctggcagccactctttccagggtggcacggtgttgtttctgctctggagtcctgccagtgccttatctgttgacaggaatttatcacctttcagtttcttttttttttgataacagaaacttccaacgaatccctgctgttttattccccaggaagaagctatcttatttttcagtacagggtttagaacagagaaaacaaggcaaatgggactgctgccagctgtccacgtgctccatcccattcatatgtgcaggaggaaggcaagaaggaatgtgcaaggaacggaagcctgacatctccaaaaggaatcaagaatgtcagtgttggagggtgtcatcagtcatctgctccatcggttacccactgaggtggctccccagactgacactcttcccaacaggctcaatgggccctctcaaccatcaaatgcatgagataaattaaaactaaaactccatctgagctatttctgttgacccttgtaaatatccactgattctatttatacttctgtttcctgatgtcacctgtcaacctccatagaaaggccttctcttatatctttttatatacagaatagaataccagtgggcaggtggcaaaaaaacaaaacaaacaaacaaacaaaaaaacccaaaaaaacagcctacatttattgggtgctactactcgtatcttgctgatcttgtgctttttttttttaattaactcatccaatcctcaacaacaaaaaaccctttgagacaggtattactaatgcccccatcttaaagctgagaaaactgagaaacaaagaggaagttgaccaagagaacatagatagaaagtgggacagtcagcatttgtactcgggtttttctgattctggagtctctgcccttagtcatcattcttgtttctctagccacttagcagggggaagaaacatagctttctgttggatttgtgagtaagctttagttttattttagttatctagtctgcactcaagtagcctgggttatcccaagaagtttgatggctggaggtcagttgaatgctatcaactgtacttactactcgtagactggaagctgcatgaagatgagatcagacctgtcttgccccagcacattctcagccccaggtgcctgacatgtatgggaaaatactgtggaatgaataaatttgtttcttcctgttttatgactgttgaatactactcgtatttaatctctgacacaagcaatgcaggaaaaataaaagaaaaactcaagaccctaaataatctggtatctccttgaataaacagagagaaaataaaaatgtcattttgggtttcaactattcaggtacttgttataatcttccattttgctttttctgtgtacatacagatttggtgtaaaccgtatgtattagttagggtagtactagctgtcatgacataaaccctcaaattgcacgggcttaacacaatacagttaagtttattattcactgatgcaccagtccaatgtcctggtcagagaatgactttatttcttaaggtgaagtagtggcccaagtttcttttatcttatggcttcaccatccacttagggcctccaagtcctctgtttccagctaggcaatgcggagaaggcacacccactttttaaacaccctggattggaagcaaaaaacatcacttttgctcatgttccattagagagacctagtctcatggccacacttcgatgtatgggaggctgggcattgtccctggctgagcagccgtctgtcagctctatggatgaagcagcatgaatttttggttgcaattatcttccttccactacagtgaagactaagcacttatttagcttgctatttaaagtaaattgtccaccagaccacatgtttaagttagaaacatcacagtcttaggtaacttttcaaaacttcatctagcaaagtgtaagaacagttatcagccaaagcacaggcattaattgacatgagctcgggataggggttggagcaaagccttagagtcggaggctcgcgttcaaatcctgactgcagttactgtttgatcacaggcaacttagcctctttgagactcagatttctcagtagcaaaatgggcaacataacacccaccttgcagttttacgatgattagcagggcgatatgcatatgtaggggtcctaggtagtaaataaataatgtagtaggtagtaaataaataatgactgctactactatgttttctgaacaaatgtttcttttttttcttttatttttaactgacacatcattgtacatatttatggggcacagtgtgatatttcgatacatgcatacaacgtgtaatgatcaaatcagggttattcacatagcaaacatatatcattttgttgtgttgggaacattcaaaatctgctcttctagctatctgaatatataaaataaattattaatatagacaatatattgtatataatttatatacaataaattataaacatacaataaataaatatatacaatcaataatgaatatatacaatataatattctactgtatgttcttaaatacacaatataaattactaatttattgtatcctcccaattaaattattaattatagtcaccctgcagtgctatcaaagatgagcacttatttgtcttatctagttgtaattttgtgctcgctaaccaacctttggctatccctgtcccctcccccaacctctagtaaccacaattctactctctacttcaatgagattaacttttttagcttccacatatgagtgagaacatgtggtatttgtcttgctgtgcctggcttatttcactcaacataatgtcctccaagctcatctatgctgcctgaatgacaggattcctgaacaacgatttcttgagaaagcgaacataccttctttcttttaaattgctttgaaaatagaaagtgcagtgaaggaccagtaatgagccttatgtaaataaaagatgtaggatagtgtggatgtcacactttcaagtgccaatgttactacatctgtcctgtatccaagaacaaaaccagaaatcagagtctaaccaagcagtatgattaaactgcttaaaattgccccaggccaggcacggtggctcattcctgtaatcccagcactttgggaggcctaggcaggtgggtcacctgtggtcaggagtttgagaccagcctgaccgacatggtgaaacctcgtctctattgaaaatacaaaaaaattagctgggcgtggtggcacatgcctgtaattccaggtacttgggaggctgaggcaggggaattgcttgaactagggaggcggaggttgcagtgagccaagatcgtgccattgcactccagcctgggtgacaagagtgaaattccatcgcaaaaaaaaaaaggctccaaattctagtaggagctatggaagatgaaaagtatcgtattaatatccacgatttattgagtggatatagtctagcccttaatcctcataccaaccctgtgggatgtgttattggcgtaattgctaataccacatacattgttactgtcaggcctctgtgcccaagccaagccatcgcatcccctgtgacttgcacgtatacgcccagatggcctgaagtaactgaagaatcagaaaagaagtgaaaatgccctgccctgccttaactgatgacattccaccacaaaagaagtgaaaatggccggcccttgccttaagtgatgacattaccttgtgaaagtccttttcctggctcttcctggctcatcctggctcaaaaagctcccccactgagcacctcacgacccccacccctgcccgccagagaacaacccccctttctttgactgtaattttcctttacctacccaaatcttataaaacggccccacccctatctccctttgctgactctctttttggactcagcccgcctgcacccaggtgattaaaagctttattgctcacacaaagcctgtttggtggtctcttcacacagacgcacatgaaagttaccatcgccactttgcagattagagaactgaggcatagagggggaaaacaattatccaagatgatcataagaggtggaacagggatttgaacctagtcactctgcctctagatctgaagctcttaatcaaggagcctgggctcttgttggagaaaatgctttatcgatgtgaaaacattcacacacaatgcctgatagcattgtgctgaagtgtggttccaattataaacgtggtaggaattcagtctggagaggaactcccagtgcctgggcatgactgtgtgctaggcattgtactgggtgtttttcatccttcccatttaaggagacggagcatggcatatatgaaaggagaagggggagctttggaactggacaggtagggtttaaatcctggtcctgccatttacaaactgtgtaacctctgggaaattacttaacctttctgatacggtttcttcaattgaaaatagggattgtaaacagctactttacagaggagggtttactgtcataaaacagtaccagcctatggtagatgatgctgttgattcaatagatactgatgaagtcccacatatctgggagtaacactatcagccagaataagccaggttatgctgctttaacaaatcccactgacttaacataaataaagtttaatatttgctgacactacttttccaatgcagattggctgggattttctgccatctttacacagagactcaggctggcttggggaggctccaactttgtaccaccatgattgtcaagataggaaaaagaagacatggggatttgctcactggctcctaaaggttccaagtgaaagcaacacaatcacttctgctctcattccattggcctaagcaagtccgatggtctcatctaacttcaagaggatggggtagtggatttctaccacatcgcaggggaggggaagaagtagaaaatattttaaaatactactgtagacacaatgtgtttatctctacaatagatctgctaaatccatatcttaagagaaaaccgaagctctgagaggttatgtcatttgaccaaggccacacagccaatcctctgggaagccaggactcaacctgcatgccactcatcctgactgtgggatctataggcacaacgtccacaaactgtatagaagcagaacagtttcaggatgggggtgggtggcagggaggccctgcaaatgcggtggacagaataggaattgaataggcatgatgcgcctttgtgtctgtgttctgtcattgctcctggggaagggaagaaggggcagggaagtttgtgtgaaatatcagtagaaggaaagtttggacaggtaagaatatcacgcgtcagagtacagcagagacacgtgtggaggatgagggcagtgtttcaggccattactctggcagcagtgaggaggctcccggggagggttggggagagcgggctgttgctggagtccggggtaaggtgaccaggggtagacaggaatgaaggcggcgggaatgtagaggaagggctgcacctgagagctgcagaggaggccccagtgaggtccactggtggaaaagaaccgccatgcgatctgcagaacaccagaccttcttcagccttcactcttcccaccctagtctggtacattgcaccacttgttaaaaaaaaaaatttccctaagacctctttttctctagccttcttccttatttttcatggtctcttcttagaacggcggcagccacgccgcggtgggaggcccttcctgcctgacccttaccgtgcggggtaccgttcctgtcaccatcgccaggatctggccctttcagtgaaaggaaatctcccaaggcctaaggaggcaagaggcctgcaaatcgcctcctgctcagcaaacgggttgctcagcaggcccggggtcctggtccaccccaggtccctggtttgcccacctccgatggcggccttcgctggcagggtgggcgcctctggggagccagctccgtcccggcgcctttagagccccatctcttccacgtccctggccttcctccccttccaggcggctgtccccgccggggtccagatggtgtcggagggccggcggttcgacggcgggcccggggttcagcctcccggcctccctccgtccctgactctcctttcttcggagagggcgcgggggccggggccaaagcgccgctcttggggttctcctggactcggagttgccccaggcgggcgcagctctgccccgcggggtgccagcctcgggcgggcaaggtccgtgagtcaccgcctgtaaccgaacaccaggcctccctgccccctcccccagctccggccgccaggctgcggcgacacctacaagaaaatgaaggggcgcccaggcccgcggcggccccggccgtatcgcgagcaggtcccggcggcccccggctcgcggcgctctttcttccccggccccggggctcggccagccgcaaccgccgccccggcgccagcaggaatccaggccgagcgaccggccccggagcccgaggcggcggagggcccgcggtagctgcgactggcgagcccgagagcgcccggggagggggcgcccggcttggaatttcccggtcccttccggcccagcgaggacaaagcactcctggccgccgccgccgccgccgccgtggcctacgccgcgccgcacaaagggcgagtcgcgacacgctcccatccccctcccagctcacggcggccccggccccgggtggctgcagggaggtgggggaagccctggctgcaccgcccctcgctccccctcccctggggccgcgcgagcgccgcccccgccccgtctgcgcgtcctcccggggaggggttggggggcgcggcgccccacataacactccccctcctgcgctgcgagccaccctctcccctccctcctgcaaacaccaccgcctcccctgccaccgccgccacctcgcccgacgctccacagctcgccgcggccggggggcggtgcgcggaccgtgcgcgccgcgggcgccagatgtgcagtccccgccgccgccagtgaccgagccgcagtccgagcggtatcgggccgcctccctgatgctgcgggggcgaccttgagcgtacagcggcttccctcggtggggaccccgacatcccagcgctgtgcccggtcttgccctctgtagcccggctcgccccgcgcttggacatggaaggggccgccgcgcctgtggcgggggaccgccccgacttggggctgggggcgccgggctctccccgagaggcggtggcgggggcgactgcagccctggagcccaggaagccgcacggggtgaagcggcatcaccacaagcacaacttgaagcaccgctacgagctgcaggagaccctgggcaaaggcacctacggcaaagtcaagcgggccaccgagaggttttctggccgagtggtgagtggggcaatcctggagggtgcggggggcgctgggtggacgcggccggggactgagggcgtgcgaggcgggggtctgtgcgccctggggctctcttgacagagagggggctcattgggaagccccgagacagactcctcactctttctccagcaccccgtgactcaggcgtgtctctgtcctgaaacacttgttacatcctgtctgcacatattttattttattttttggtttgtttttaaaaatttaatcctagcagcaaaggaatgttttagatttgcaaacactttgcagcgttgggacggccggggtctctctccctcgcaggcactcatttagaccatgccccgaaacgtcttatttccacaactctccaaagaaccacattcccagctaggagctagcccctcaagtccggtgttttgtaggtgtccctacccccttccacccatctgcccgcagctccttgctctgcatcctcccactcagactctgcatcgccctgatactgctgtgactgcaagggagggcgactcttgcctgtttttgagacaaggttagggagcaaaaataaagactactgcaagcctgaggattctaacagtttgcatcatggctttgggaggaccgaaatgtccagggcatgggtagctacagagatagctgtgcttagttgcagcaggctcagttgtgtttcagctcctggttgcagggctaccaaaccgctgaaggggtctggccccgctgctcttgtgacagctgacaccctgccagggtcctggcaccatttgcacagctccaaggagtgctttgagtgccttggggtctgtctgccttgtcccagccttggtttgttgttattttcacttctgcagaacaggcccttgaaatccacactgcttgtggctagagagttgggttcaaagtgactgactgttgcagaaagattttgtgtggtgtgtggcagaaaattaacatggttctttgatttgaagcagatcagatgtattctaatcgatttagggccaaagtcagaaactgattatgggactccttgtgtgcacttttgggggtgttttggaggctcaggtttgcttataaacaacaaatgactgcagggaaaaaggaaaatgagctgtcaaataaaatagcagcttagtattgacatgtttcttttgcatttcggcaggaacagttctgtgaaaaaaacatgggggtgccagtcagcaaagttcagtccccaaattctcaaatatctggatacccggataacgccctcccaacccatttctcagatttgatgtttgggtctatataacttcgtcccataacgttattttaaaaaaaaatctgttatcaattaattggaaatttgagatggcgtacatttctttttaaagctggctctgtaataaattctacagcaagcaagtagttgagaattcactctgggcaggtgccattttcgtaggatgaaattgttaaaggggagggttgtaagggtggcctctgatgaaggcaatttcaggtttgtggaagaagaggctgggaaacgtgcacttcattcatgcttttcttctgaggtgatattccccaggctggatgttgaataagcaaaaactaagcttagatccctgctcatgttgtcttaatagctgctgaagaatcgcactgggaaggtgggaagcagaataatgaaaaacagacgcagttcgagctgcaggttgagaatgtgaggctatgaggggttgttgaagtggtaagggtgtgtctagggtctgtgaagggaccccaaagtctaaatgctggggcactacctcagacctttctaacgaacgaacccttgtcttatggcagacgcctttctgagcgtcagtgggacttcctgtcaggcgttcttgagctgtctgatccacagactaggttagagtgaaagggatttgcatcagtaggcaggagtccgcctttctcttttgggggatgtctttctctgtatttgcagaaactgaacattccgtcaggatttagtcaagcggccacgagggggcgccctgagaacgagagaggcttctttaccagccgcaaatctgaagtcccgctgtgttattgttcagccctagttcattttcccattgtgctattaatttcagctaaatctcttgttttaccccaaaattatgtaaagattttaaatctggcagcagacccacgcccagaaactgacagtctctaaaatgcttcgtttattcatggggctgctttctccttgatagctgagcttacagaatgttagccagatccctgggtaaaaaccttgcataaaacagatgggaaaactgaggtttggggaaggaaagtcctccttggccccccgtcctccccctgctgagcacactgctcacagatggtgttaagaactttagtgagaaacaggaattgtcaagtggaaaatttcctgtgactggctgaacagaaaataacaccaaacaaacaaaaaattggtcaacgagttgttcttgcccatacagtgcctggtgactcagaacctgttaagagcagtaagacattttcatctaaaatatgaacttggagttttcttctggtaccagcgatgtgctaaacattcacaacatgctttgaaggtgcagttgaggagaactgaaagggcactatcttaatttagccttttgatctttgggtagaattttgaagtgatgttttattttcatttgcaccagtgccttttacagcatctctcaagaggagcagtggttctaacgtgttttactaatgtgagtggcccaagacaggtgccgagtatggggttgtatgaaatgctgtgaaatcaacatccctgttgaaagcaggggttcttctcagagaggagagaagtttctaaaaaatgaggatgtgatggtttttaattgcatacctggaaggaccttctgaataaaacaaaacacaacacagcatcattttctatgtgccgcgaaaggcagttctgaagagaagtgcagaatgagatgcttggagtcagctggtgcgaccctgtgtgtcgtccaggcactctcctgcagtcttgcagcctctgctaaagcatgtccgtgagaccaggactcagagtggcttgttccagagatgaacaagctcaaaaatgaggcactcttgcagaaaggcaaagagccctggcttacattcaaatccttgatctatcccctactagctttgtgtcttttggcaagctatgtgactttttgaaacctcagcttcttcatcggtaaaatgagctactaagagtaccaacttcatagacttgtgagaactgaatacagtgatctatataaaacctcaaaaggggacattaatcaatttagttcctccttttagcagattttttttctcatctcattttaggatttcattagattttaagaccatcagagagacaatgcattgtatcatgcagagagagatagaagaaataatcaacttttcagagtaataaaataaataccaaattaattagggaggtgtgtccataggaagatgagataattagccagattcagataggatctgaacacatttctcaagtcttgaatttgggccttgtttattgcacaactttggttttgatacagttttgggcaggcctactgggtgagcctctgtgtcataattcggcatgcattttctttgagctaagctccctggacctacaggccacacaaagcgttgccaaaaatcccaaaaccaaagccacacaattttatgtcctgtgatcacctcgatgtcaaggggccaagttcaacttcctcactgtaccaggttatctctagtgagcagtaggtggtgtggtgtgagctggaggcagggtccctgggggggagtctgggatgggagtggcaggactggtgggcaatgtgtgcccctcccccacagtctgccctggtgcccctggccactagagcattagcttgggtgatggggcatcctcacctagcaagccaagtgttttgaccaaaaatgggtgttttaagcacccaaagctattcatagcctcctgctggaaaactgcaaatcagggaggcaaattagcaaactggcctgccaagccaggaggtgtgttgacgtcacatgcacggtggcagaagtgccatgttgcagctaaggcccaaatacagttttagagtgtaagggaccatggcaaacatgtggttcaaacttgtcatcttcgaggtgggaccagtaaggcgcagaagtgttaagtgactttgttgaggttgcacaggtcttgaatgacggagctggatcttagaaacccgattcttggtttggtatttttccatcactcatttaataaatctttactagagaaagacatgggcctcactcttaaagaacttataatctagtagcaaaggtgaaatgtacttgcaaactaattctgttcagttcgatgaagatttattgccatctgccatgtgctactcaccatgttaaatgctgagacatagaaatgagtaagacccagggagcttccagcctggtgaaagagaaggcagaagtagttactaggcatgagtaactcttccatagaggattgtttcaggtgattttcaagttggacaacagttcattgaagcttagctcatgaaagtgagtttgatcctggacagaatcatatttctactgctaccattatttactaccagctgatatttttgagagcttgtggtgcatcccactgtgctaagtgctttagagacattttccctcacttaactttcacagcaaccctgtgaggtgtaaaatagtgagacccattttacagatggggaaaatgacacatagggaggttaggtaacttgccaagggtcagacagctggatggtgtttgtttgtttggatggagtttgtttggaaacccaatgctgctagaggaattgagaaccttccttaatgttgcacagctggtgacctctggatttgggtgtggttctttgctaatggtgccagaagagcagccatggggtgatcgcccacccttccggaagggtatctagaggaggggccagggtatactgtgggattagaaagtgttctccagctaatgggaggacaagtgctgttgaaaatgacccttgatttgggtttcagaggattggaatgtggggcattccaaggcattcattcacttgtgtttgggggaaggtgaatattccaggtggcttggaatgcagggtttgtgctgggacacaatgggagggcaggattggtaaggtaagatgggggtaataataataattgatgctaatgcaaataatagcaactaatacttcttgagtgcttataacatgctaggtgcatgttaactgatttaatccttataacaattctgctatcatcccattttctagatgaagaacctgactcacagagaggttaactagcttgctcaaggtcacaggcagcagcagagccaggtttggacccaggcaatgtgaatgcagagaccttgaccttaactcttcctctagaggggtctgagctgggttctgatcacagtggggtgttgagcccgtcagtttggtgtgctggcttggagcagggagtttttgcaagagttgaggttgggaagataagaatcagagccaagttagggagaagagatgtgcctgcttctggtgagccatctgtttgttggtctgtttgttggacctcgaggagtttgttgtaatgaatcaggtcagggagctcttcacctggacacatacagagtcctttgtttcccaagcagcctcagaccctggagtccctagggggctttgaggggtaagctggttcacttccctgcctgcagacaaaaatgcccccacaccatgccagtgtgtgttgatcttgcttcctcctgggaagcagcaggagataagggtttgagtcaaggtatcttgtctgtcgctgtgtcctgtgtgtcttgaatccatcctgcaaagatacttattgtcaatgcctcacatggtgccaagcacatagtaggtcctcaacagaggcttgtaggatggaactgaagtgaatacattgagcgagagaatatcttgggaggtgtcgaagttgtacgttatctttcctgacctcaaggaactttagatttgtggggaaggaaagacaacggttgaaaatgaatggcaggttacagagcaatgtctgaaaagacaggcagacccttttctgcacgaattccccttctgttacgtttgcacatgcatttgttagggagagacgtatatccagggtttgtcaggtttctggccgtggcttcttgtcctcagtggctccagagtcagacagcagaagtctcatttgtctttcccacatgaaagtcctggagcatctgtaagttatgatttgtgaagtatctgctttaaagcagaatgcatttatcatcgtgctggcccagacgacattgtagagcacaggaatgagaggatcccaggcctcagagtaggaggggctgggcctgatgacccaccgtgaatggagtctggctgaattgataaaattccctggaaacagcccaggagcagccagatgttggctttacagcgaaactcttcggtaaacttttaactgcatgtgaaaaccagggctgggcatttccacttctaggtttacccaggagaaatgcaaacatatgtccacacagaaacttctacacaaatgtctatagagcattattattagtaagagccccaaagtggaaggaactgatgaatgggtaaataaaagctggcacatccatttcatttgtggaatattacttatgatctattccataattttatttatggaatatttttggactgttattcaacagtaaaaaggaatgaggtacttaatacatgtgacagcatggatgaaccttgaaaacattatgttcagtgaaagaagccagacacaaaagaccacagattgtatgattccatttgtatgtaatgtccacaagagacaaatccatagagacagcgtagatgagtgggcctgcgggtggggttgggagtaaattgggagtagctgctaatgggtgtggagttttctggggggtgctgaaaatgttctaaaattgtgatgatggttgcacccctccgaatatactaaaaacccctgaattgtgcactttaaatgggtgaattatatgatatgtgaattacatctcaataaagctggtaataacttaaaaaggggggggctcagggtggagagtgggaaaggggtggaagcctctatctctcaggcctctaagattccaacctctggttccacagaaatctcatgctcattttgtgaaagaagcgaagacaatctcctgccaaccatggtcaacatagagagccccagggccaggctgcctgtgtctgtatgccagcccaccccttgagagctgtgtgaccttgggctagtgactaatttttaacctctgggttctttgctagggctcacaatagttcttcttttatggattgttgagaggaagcaccgaggtgacatagctaagccttttgcctggtgcctggcacacagtaggtacacaatagatgcagccagggcgattgctactctacaaggcacctttgtgcaaattaaaaaaaggcctcctccaggtggatacatatgaaaaggcttctgtcctggccagaagcagcccctctcctactagcggctctgtgagaacgacgcgggctggggcccattcacctgcccatcggctggtgccttgtgcatgtatgatctgcacatccctgcttggcagccctggtggtagcttgctttcttcttcctcttagctaccacttgtcaatactctgtggctgaagcttccccataagaaagacctaacatccccacattggggctcaacacacctgctcttcttttcaatctagcaataaaccagatagatgtatttaatgtgtgcttaacaatgtgtccagcaccatagggactttcagaggaggatattacaagtcctgccattgagatacctagaatttagttggggctattagattcagacatctggaataatctgagaacaatgcaataatctgagtatagaaatgaggtgtcgaggctgggcacggtggttcacgcctgcagtcccaggacttggggaggccgaagtgggtggatcaccggaggttgggagtttgagaccagcctggccaacatggtgaaaccccgtctctactaaaagtacaaaaattagccaggcgtggtggcgcatgcctgtaatcccagctactcgggaggctgaggcaggagaatcgcttgaacctgtgaggcggaggttgcagtgagtcaggatcgcgccactgcactccagtctgggtgacggaggcagactccgtctcacagagagagagaaaaaaaaaaggaatgaggtgtggaggaagaaatcccagctgtcgaatcagacagacttgggttcaaattctgtcctgctacccaggagctagatggtcccaggcaagctgctcattttctctggcttctgtttactcatctggaaaatgcagctatgaagtatcctaccaagtgcaaaatatcctaccaagtgagattgccatcagaaataggatttggaagcttccagcacagagcctggtgcatagtaggctcttgaaaactagaggtaatattactgtttcagggagaagtactagggtggagtacccagtgaccttcttatcttggctcatggctctccatgcttaaaatcctcccatggttgcatgggacccaaagtctgaatttaccatgtccttcaaggctcatgcatgggtcttcagaccaccacttccttacttctttgtttcagccccgtgtctcgtgtccttgtgagcacatggagagtgtgtgttggactatttgtaggctccattcttccttgtctattagaaaggcagcagggctgctgtctgtctcactcgtcactgcagcccagcctgtagcccagtgctaggcatctagtgggtgctcagtaagaatgaatgaatgattgaatgaacaattgcgggaagaagcaccagcaatcctgagaagggagaggtctgtgaaggcgggagtcagcagggaaggccctggggctccatcctcctccttctctgggtcacgcttccccttagcattgtatgcacagcattgccaggtgcttctcagtgacagcagctggagaggtggctcaagcccatcccaaacccatttcccactcttggaggctgctccaggcgggtagtttttcagagctcagcagcctcctcaggctgctctcacactggcctggcttcgttcagagtccagccctccatctgagaagcccaggtaatcagctctgcagagtgtgcaaggtttagatgcaaaatgcatctgcaaggttttcaaaacatttttttctgggttgtaaatcaagtactttaagtattgcaaaccggctggggtgcggagttaatgtatgtcttgaaaaaacaccatcatgatttgccttttaaatttgagaaaagaattccacttcccttacttttattagagatatggagatctccagggggaaggcgctaagtggaggctgtggtaggtgttagctccttccctggaagggcggggaatggtgagtggcttagggctcaactttcgtctgtttggctgaagggcaatttccctgtttaaaaaaggtagcagctgcttctcttagttatctccagcgggaccccattcacttttgtctgtgtcaggctcacgggccacaaaggtgcttgattgcagcaggttcaaacgaagccttgctggctgctgccatttcactatgaactgggctcagctcacgagtggttcaccccaactgccagaggtcactcatgtcccagtcttctacaggatcatggaagggaagtggaccgtccaatctatacatcaaaaagggaagcgggagtggtggctcattcctgtaaatcccagcactttgagaggccgaggtgggtggattatttgaggttaggagttcaagaccagcctgaacaacatggcaaaaccctgtctctactaaaaatacaaaattggctgggcacagtggcgcacaccagtaatcccaactactcagtaggctgaggcaggagaatcgcttgaacccgggaggcggaggttgcagtgagagaagattgcacaattgcactccagcctaggcaacagaacgagtctctgtgtcaaaaaaaaaaaaaaagaaaaagaaaagagagaatttggagctaggcttcctgggtttgaaagaacatgaacctccaatgtaaccttgagataatcaactgtgactcggtttcttcgtctgtgaaatgggagttgcagtgttaacaaattgtatgtcgagttcttagaaaagtgtgtcgcccacagtgaatggtccataaatctaagttttggaaggaggcctctttggaaaggcaggatggggtcttggtcctgtctgtccctgcagcagcctgggcacggggcattgcacacagtaggtgctgctgtgtcgagcacacttgcttcacttgtaaattgagggcctgagacaaaaatgtccttaagggtcccttccagctcgtaggaagagaatcctaggattcactgaaaggctgcatttcctattgcttgttttttggcagaagggctccttgctggggaaagcaggaagtatcttcaattctcatacacactttgcaagtgtacggagagtctccctgtgtagactgtcagcctatgtttagggaggtctgctcgccttccctgctctctggttctgtgggatgcaaatacattctattcagctcaaggcagccaaggctttctgaaacacgtgtatgaggtggcttctgaactagactctatgtgagacagaaaatgttcacccatgctgggtgtggttgcttctgcctgtaatcctacactttgggaggcagggggatcacttgaggccaggagctctagatcagcctggtcaacacagtgagactccctcatctctacaaaaaaattgaaaagttagctgggcatagtggcctgcgtctgtagtcctggctacttggggggccaagatgggaggattgcttgagcccaggagttggaggccacagtgatctacgatcacaccactgcactccagcctgggcaacagagcaagaacttgtctcaaataaaagaaaataaaaagaaaatgctcatcctcaaagaacctctcagttttctcatctgtaaaatgggttggtaatagaacttaactcctaggttgtcacaaggactcatggaccacacacactctgagaacagtgcctgacatgaagccacttgtcaagcagtgttatttgttattatttgtgattcagaggagggtaagctcatgttctgctgggcagctcagaggaatctttgctcattccttagatgcttagactttaaaggggctttgcttttggtcccagtgaggccagaggctcctggctgcctctgctctcaggatctccctgtggacaccacttattcttcccaaggctttagcagtgattgggcacattgagcacccaggagagcttggcttcttgatcctggatgacaggtaggctagaggcaagattccagggatgaggaaaagacttaagagagccctgtccccaggggaagggctgtttttgcagtctcacttagagggaagaattgactcatatgtttactactatttcatccttgaagatgaacaaataaagctaacctttactgagcactttgccaggctctgtgctgagtaatttgcctgtgtcatctcactgaattcttagaaccattctatgagatagatgctgtcacctgactttgcccagaggtaactgaggcccagggccccactgtttgtaacttggggatgatggcaggaatacaacccatgtctgtctgagctcgaaattatgagcctagactgcttcccaagaaagagtagaaatatctctgtcattttttcttgtggcaggtgttcccttctgcctctcccaggtagctggtttaaaaatatttattcaaatagcactgtgctaggcactgggggaggcaacagggagtaagatattgccccgttgagttcacccacctcttgattctagaatgtgcatctaaccctgacatttgaagatcttcagtctttgtggtccacatttatccctccttgctggtccttttaaggagactgatttcttgttgtatttatttttcttctttaatctctcagaattttattactttctatcaaacacatccgttaggcagccttggctttctcagtatcaattaagacagatgccagcaaaccttagaagctctcagtggtccttgaggcaagataattaccttgtgtgattcttagtagatttgatagtgaactctttcttccattagcagaaggcatgcaggggggagactaatggtctgtgtctctggtgagctcaaagcccagccgtgaacgtgtttgcctggaaagacagggcagtgatgtgcttgctgctctgggaagaacctcatttttcatcatcctcatggttagtgggtatctgtttttcaggcaggaccaaatggaacactgagggaggaaatgaatgagtgtgtgggcgtgaagcaggtagtagagatcctggagaggagaaaaatgaagtggaaatctccacttatttggttgtgtaggaaggtccagagcagagggagcatttttcccttaacaaccctcatagcaggaatcattgagtgatcagtgtgtgccaggcactattctaactatttacgtgctttttcgcctttgaacctgtattattatcacattcatttcatagatgaggaggcagaggcttagaggaagtccaatgacttgcccaaagtcacagagccaggatcacaggatgtagggctggaccgtctgacttcagggttcatgattacaaccactgttggagccggacttaaagcacagagaagttgcctccgtgcttgggaaaatagcaatatgaagaacttaatttcatgatcccagtcgttctatgtcttactcatttatatgctcccagtgcctagttcagtgcctggcacacagtcagaatgcaagaaatatttgtcaaatggctgtggagtgttatgagtctaggtatgttgggagacttggctgctggttccatcactgccacaacttaagctgtgtgaccttgggcaagacatgcccctccatggcttcagctaacttatctgtaagatgagcgctctgggccagatttttgttttaaaatttattatccattcaacagatatttatttatttatttatttatttatttatttatttattgagatggagtctggctctgtcgcccaggctggagtgcagtggcgtgatctcggctcattgcaacctccacctcccgggttcaagtgattctcctgcctcaacctcccgagtagctgggactacaggtgtgcaccaccatgcctagctgatttttgtatttttagtagagacggggcacaggctggtctcaaactcctaacctcaggcgatccacctgcctcagcctcctgtagtgctggggttacagtcatgagccaccacacctggccatttaacagatatttattgattgcattttctgtgtgagataccactctggatggtagggagacagccatggtgagacagatgacgtttctgctcccttccttgcagcttacattccagccgcttctagaaactgcattttgtgaatcttcatgtcttgccccaaaattgtttcaaagtggcagttgctgaattctcttctgtttgccttcccctactaaaaggcaagccagggcaggggttttcatcagttttgcctactgatgtaccccaagtgcctagaacagtgcttggcaagttaatattgctgatgtgcatgcatgcatgaatgattgcaatatctcctctgctaatgagatcccaggatataaaaattctagggctgaagcctaagaaaaaattaaggagcaaaaatcaaattttccaggaaaaaatcccattttccaggaaaaatactgtctttataaaggcaagaacagttgagattgggatggtttattattattcctgctagttgagggattagggaatcaggcaggattccttactttttcatctggtgatgctttttgcaaaccgcagagaaaacaaaacaaaaacaaaaactcttcctttcccccaacccctttgcttcaagcagaaaaagcacttgcttcttaaaacagctcatgaaggaaaaaattataacgaatattttgcatttctctggtggcggcacagtctgaattccattcagccccacaatgagttctaattttatgaaatgtttggattagccaccaattttccggtggaatttaggaggcttgtactcgtacttacgcttgaagcaaagaaatctcataaaatccttgcagtgtctcgggcccagtgggacgttgtagccaaggacaaaatgaccatcagcagaatgacggggaggaaagagatctctttggcagctgtggcctggctttgcagatggtggtgtgatcctgagctgcagtctctggggcttggccgggctgcataccattttcaactgatcatgggctataaaaattccagcccaagcacaatgcctcgtacctgaccttgttctttcaattcccagagccagagaacattagggcatctggtaattgggtgagaggcatttgatatagcacatggtgctctgtcttcccctcctcatagctcatgttgccttttgttgtaatttccagctcacatatctgcctctttgcctctcgacctgcactgtctaatatgggcacatatggctattaaagttaaaattaattataattaaataaaacattcagtccctcggtggcaccagccacatttcaagtgcccagtagccccatgtggctagtggctatcatgggatgttgcagaatagatcatttccactatcatagaaagttctgctgggcaggactagtgctgctctagacactaggttgaatgaggacatggcacacacttggccccttaccttgctttattagctccatagcacacattatgatctataaagtattatgtctctgagcaacctcgttcatcacattttttgtatctccggtgtctagaacagttcctggtatgcactaagcacccagtaacgattttcagaatgaatgaaattgcctgaatcagcattgctttgcatgagcctaacacatagtgagtcttcaaacaaatggaacaaatacttctagaggtgaaaccatgtaatggattcatctgatatttgtcgagcatggactacaggttgggcgttatgcgaggctctgggtatatagtgatgagcaaacaaacagatcctctgggtgaggagcttattcagtccagtggctcttaaattttcagggatgtgggaatctcctaggtgcacctgttaaaatataccatccttggcactgacctcagagagtctgattctgattcaacagggttggagtgggacttggggacacccgagtatcttctgcattttaaccaagcaactcaagtgaatgtgatgggggaagtccatggtctttattttgagaacacagctctggacaatgggaagctagttgctgtattcatttggggatacaccacaccattttctctcgtctataccttctcttgtgataaatggagggctcctatttgggcctgaaacttgaggtttcttttcttgttatccaatcatggagtaataataatggcaaacaattacatagcagcaattacatgccaggcgatagtctaagcatgtcagtcactgacctgaattcatccccatggtaaccctaagaggtgaacaccattatcatccccatttttcaggcggataaacaggcacagaaaactaagtcacttgcccatgtttacactccttgtaagatctgaaaatcctgaactgctgtgatactgccgctcatggccactggacttggggcagctgcctcctgaatgcccagtgtgcctttttatccttttctgctagttgcttggaatcaaagttccagtatacttatgaaatgcctgtttaggggattaccacgtgtggatgttatgagcactgttggtctacaaatatccacccctgcccccaaggagcttaactgttcaatggacattcccttgggcctactgtgcaccagccctgtgtagtacacccaggcataagacttgcacttggtctaatggaggagacagaggcacaggcaaagagtttctgagaaagtgtcgcacacaagataggttttcttctagatgagaaaagcaaagaaaatctttaagattgggttttcctcacttttgctacttgtgactcagtttttacatagttttgctgtttcacccagtaggggtgtgtgcatgtgtgtgtgttttgtgtgtgtagggatccaccaacccgttctgtcagcactcttgttcatacctgcttttcaggagggatgttcctccctccccacacccccccacctttttttttcccgagacagggtctcgctctgtaccccaggctggaatgtggtggcacagtctcggcacactgtaacctctgcctcctgagttcaagtgcttccagtgcctcagccacccaagtagctgggattgcaggcacccgccaccatgcccagctaatttttgtatttttagtagagatggggttttgccttgttggccagggtggtcttgaatgcttggcctcaagtgatctgctggccttggcctcccaaagtgctgggattacaggtgtgggctaccacgcccagcctcccacccttttttaaccacttagaaagacaggagaccccttagaactgagagctgcttcgaactcctgacccacgtgggagaaccttgaaaagagaagcgtgaaatgaggaggggttaacatttagaaaccaccttgtgtgtgccttctgcaagatacactaagtgatgcagtttacatacattatcttgtaccgtcttcacagcaactctgtgacggggagtgatgatcgtcctcactttagggttaaagaaaccgatgctcagacagaagggctgatctgctcaagaaagcaagagagcattggagttaaaagctcgggtctgcctgaccccgctgtgggttctttccgctatgtggctagttctcaggcctggctgagcatgagaatcacctgggatcttttcaaaacactgatgtctggactttaccccaggctaactaaaggaggctgcctggggaaggaactcaggtatcagtatttttaaacagacccgtaggtcactgtaatgcactgctagggctgagagccactggctagagcatgctgacagcagaagttcaagggtctgctctcctgaaggtggccccatccatgcctggtcaagatgggaccttgcttacaggaaggtgagccccctcctccatcctcgcccctgtgggaccggtgtgtccgaagccattgcactggacctgggccgagacctcttgctatcttgcgtcataggctgcctgtaaatcagcagctggcttgtttgctttttaggccccagttgtagtgacctttgactgtctgtttatttcagggaaataattccatcctgcgaaatcaattccctggggactacagaagtacatttggagggacttctgttagtggggtgacctgagatggcttctcagaagaggcgacagctgctccttttctcccagcccccttctcactttgcccccgacatcgtcctctgagtctcagattttgaagttctcattgtggtgtttgtatttgcacacgcctctgcataacgtctgttcgttattattataataataaaaatgataagaacagccagcatttttggagcatatactggatgttgggcacaatattgggcattttctctatgccgtctcacatcactttgccttttcttggcaatgatgagggcaaatctaagtctgaaattggacttcttatccttagcaaagggccagttgcagtggtgctgtaagtttctggtcctgttggaggccatggtctgtagagactgcgatattggaagtggtagacttggctgagatgagggtgggtagttggctcattgtgtggaccggtgtgggaaaagcagagagtagcccaacagcccctagtgttcagcctgccatgagcctcagtcaagggaatggagaacgctggttaatcggatgctttggttaagtggaaatactaataagttataatagagagctctaaatatatttttttccagataattgaagctcacccatttaagagccaatcctcttaaacattgtaggcatttcttcaggaaatctttctcatcgggatgcacactttcttgccttcttaaaacaaagttccttgaaggtagtgaaaactttttcttgatgagtttgagaaaattctcctcaatggtcctctgtactgtgttttggagttctcatgtctgctatttatagtttgtgtctgtcatctcccttattaactttcattcctctttgtgacctttttaaaaaataaaattcttcttttcccttagcgaaaatagtgcatgctcaatactgaaaactcgccagatacagaaaagttaaagattaaggggaaagtgagttgtcatgtcttgcttctgtcagtgaggctgtgtctagcagctttctagttccatttttccagcttccctacagattttctgtgagtaagctttcctcgtaattgtgttagtaggaaaactatgggtgacgatctgcaggggcgccgtgcatggaatccatggcatttctttgagtggcatttctaagggcttatttccattccccaaagtcttcagggctgaatggcgctccaagcatgaagtcgtgttttctgggtaacaggatgagccaccttggagtaaatagggctggtcggggtcactcagttaggatgtggctgagctgggtctcttgactcaaggtcaagtgtattttctattttgctacctcttacctgtgttttacactacaggttaagagatagtggttttggcataaagaagctattgctatatttggataattaaaaccaggaaaaacctacctttatctcagtcatctatgttgctcaagtgacagatttttagatttcttttttgagggagtaagaagtagaatttagtccccttattagcatgccagacccagtctctgttggaacatcagtcttagattaatactgagatggactcagaaatacacttgaaagcaacttgcattattatccttacatagcttacattttatgacctgcttaaagatgcaaggagcataaatcttgggaaggatggtcttatttacttgttcgtcttttctgcagatgggatgctcacattagagccgggctggcttcagatgtctgctccaggatattttagctgaactgtatgagtccattaaacaaatgtaagagtttttgggaaagaagagcagtgtctcaaaccaaatgttttacatggagaacatctggggaatattggtatttgtgtgtacagtacatcagaaagcagcttggcggggttccgcagggatgtttctggcctgtggttgctggatttgacagttttgttgtaagggaatggttcttataaagtattgccatcaaagcaacgcttgatccaggaaggagtgtccttgcttagccgcacattcaaattgttctgattagctccccgaccagaccttccacgacatttgagcaatctgctatctgagctagtttcccccaaggctttacattccagagaaaggaagcatcacaatgccagggctaagagtgttttcttccttaccacatatttccatagatttgacaaatgtggaaacaggcgtggtccagtggaagcagcattggccactggatccaagtacctgggttgaaacttgggtggggcctttgtgacctgtggaaacttggggagttcttgttggtttctgttttcctctcctgcaaaatttctagcttatctcatggggtggtggtgggggcaataaaatgaagtgggatgacattgtatctataggtgggaggccattcatacagcatggtattgcctccatggatttgtggtcttagccacaagtacagaggcaacttggaccagagtggaatctgggtagactgcccgacttcagcaacttgtagatattgggccaggtagtgggtggataggtaagaaaggaataattcttatacaaattaagacttacgatagtcatcattttttataaaattaagctcaacaaatatttattggaagtctactactatagagccagatcctttcctagatattgaggacacagaggggaacacagcagttcctggcttgcagtctctgcttgctatgtctggggcattgacaatgaatgaccttcccttttgttaggctatatactgactgtcattgtgtagcatggacagtggcaggtaaatagtttgtaggtgtgaacattatttggcagagaatgaagctggacttcctgcacctttgtgcaaagtaggtcaatgttatccttactgaatccctcccctgaaatgggatgaagctccacaataatttgatattgtatttttgtggtgtttgacgaagttattataaaaatgacatctatgtgggtcctgaagactgcatttcaactagtaccggtcaagtgaagtaggcccattttatggaggagatgactgagtgtaaggcacgcagtgtgagagagaagcagcagcaacactgccttggctttttttggaaatgggaaaatgaatagctgagcaaagtgagactcggttttctggtttgaactgatagttatttaggagtgtgagaaagacacagggatagaaatgggggagccatgcatggaatgacttctcaagaggccccatctgtgtgcatacacatcatgtgtctgtgggctcccaaaagaacactttgctgggatggttcttgaaaccttagaaagagcatctccagggctagctctagagttgtgtgcctgcctgttggcatgggagagggtgaagtatcttggtctctttcaaaaggcatcttgggggtaggaatagtcctcacagtgaagtcagggtgttcctcccaaaaggagagtgaatagggaggggctgggcagggaggagcccctgtgtctactggcctttccagtaggatggtaggcaacttgaagggtaggtctagttcatgttctctaggactggatcaatgccttatccagaacagattttccacaattgcttgctgtggaatcgactcattctcacatcgttttagggacatgcctcccagcccctcccatacaattctgccttttgcccacctggtcccacagaaagcagcaggaacactgattgatagatgtgcttttgaagatggaagtggtttaaatattagctaacaaaaggacttctggtggggacaaggcagtgcggcctcgatggggccttcatgtccagaggttctgattcagctcatatttatgtaacacctactatgtgccaggcactgtgctgattgctttgtcagtgtgcttcagaggttaagagtatggtctttcagcgtatggagacccagacctcctatttatttatgtgccttagggcacgttacttaacttccctcagactcagtttatattcattgagaaggcagaaataataatgtttttgtaagaatttaatgagtgagaggttgagaggcttaacagaaaggtactgagggcctggcacatagtgagggcttgataactggtaattattatgactgctagcttttattgtgaatcacccccaacccctctggagtgggcactgttattgtctccatttggaagatgaggaagttcaggctcagtgattttgggacaagaagggattccacgtttgaaaggtgagcaagtaaaagaaggctcagcggcagatggctggggtttaggttggctggaatgatcagatgtcccactatggttttctgtttgtcaagggtccttcttaatacttgggctccattttagcaacagcttttttgtatatactgtacattaggcacatgcttagtactggagatgccgtggtgcataaaacagaaatgattttcgtgcaaatgaagcttatgagcaatggtgagcgaggttataaaaggggacccatatctgcaaaggggtcattgcaggggatgggccatgtctgcagcagatggatgcagaggagttggtcaaccgaaaatgttaatggcgaggacaggatgtggaggatcctggcagagaaaatggcaggtgccatgtctaggggcatgagcacactccccaacccagggcacaactagggtctccaagatgaccacagacccctgccccagcctccttgagggtaggaactgagagttgagtactgggcgaggctcatccccatgatgggacggcaggaaatgctcgtctggggccgagcacactcctcagctcagcctgcggtttcttggggctgtgcatttgcaatgagcaagagcatcccagcaggcaggcttgtggagcactaatgagggagatgacaagcctcccgatggatcttgcaacgggctggggaggagggaccagccttttaactctaggaataatggacaatgagagcttctcttggaaggaaaaagatgcttgtgaggagataatgagagaggcctcgggggctcctgagtgctctccagaggctttgggggacggactgcagcctgcacggttgctcccgccctatctgataggtcttgtacattgctataaatcagttttctaaacagaagagattctgtctggataaaaataacttctgcagaatcttctctttcacttatttataaaaccattcatgattagaatataaaataagatagaaagtcatgcctctttttagcttgttgtattttaccatattaagaaatgaagaaaagtttttttggttctgctcacctggatcagctaaactcaactgactaatttcctttccctttggaaaactaattttgcttcttaggtttttgtgttcctagctcattgtccccaaggttagtgattcagtagtggcctgaagttatcatttaatagcagtgtttgcaatgaattaagaaataataggatgaaaacttcccaagtatgcgtattcatgggtgatattaaatcagtcttcagaaattggaggaaagtttggatagaactgaactgaaaacagcgtctctggcatagctatgtgaggacagacattagatggaggtgaaatacaccaagctgcagcacaagtcatgatttgtcagcaccctgaagagtatctgccactcccatctcggtttattaatgatgcaacagttctggggacttggctgtgactggagccagcctcccatgtaaatgttgaattttttttgtggcagtttcagccctgctgctcactgtggcttagtatttgattaggaaggaccccttgctcagagtgtttatccctcctggagtgggaatcaggactctcttgttgcaattccagtgctgctgataacttcgtgaacttggggcctgtatgtactttaacctccctgggactcagtttccccatctgtaacatgaggagattggcatagagcattctaagtccttacagctctaacatctactcatgataacagtcctcattttggcttctgccgtaggtactatttgccttctctgccttccatcatatacacaatctgccatgttgccacagcaaccttgtgaggttggtaccatcatcatcctcatttgcaggtgaggaaactgagccggtggcgtgattatccgagtccctctccttataggagtcgccttggctgggttgctgtgactgatgacaagcccaaggtgcagatgctggatttcttagcagtactggctcgggttcttctgggtttggaggttgataaataaaagttgcacaaccttaagcttatccaagccttgttataaacagtgtcagagtgatcagatgctaccagttgaggctgtccaagttgtaagcaacctcagccctctggcccagccctttctctcccttcccagggcaattgtaacctggaagaaaaacagttgcactttagaattctgatttggtgttgcatttggcttcagagacgtgaacgtccaaaaataaacagctgcttggcaactccagtctcagctaaatggcctggcattttcagtctttctttgaatctgatattgtctgtgttagcgtctcttgtgttaccagaggctttttcgtgctccgggttatgtgtagactgtgaagtaacccatccacacccacattccctggcatcacttcatccacaggccctccttgggctgggactagggagatacccattggaagcaaactttccatttaccaggggtaaattaattcaagtcactgagccccctcaaggaagcctgtgtttaattcctctgtgtataaatggaaggttcattaattttcatcagtcatctagtatgtaatataactgcttcctgtttaagctacagaacaataggtgtcgtcagggccacatttaccctgctttaaggtgactgctctcaaacctcagagtgcagcagaatcacctgggaggctgtaaagaatgctgataccaggtctgccccctaccctgaacactgccaccttcattcactagctctggggtgggcccaggaatctgcattttagcaatcagtttcccctttccccctaaccaggggatcggaggcaggtgatctgctcaccacccttggacagatagtgctctagagtctctgactgtccttttcaggcgggtttgtggctcacttttggcatgcccactcagcacgaactttccggtggcctttttgctatttctttggttcttgcctggtcagccacggtttgtatcttatgtttacaaacctcaacagggagtgtgaatctgcccacggtttcttagtcattaattccacttcccttgtggcatcaccacttgcaatgacattcttagctcagtctttgaaggggagaggggtgggggtgagtcttagagaccaaggaatgactgtccctgtagataaaaatgtcccagccctgaggtcctcctgagctggcccaggcccagtcaagcacgaatctgctttgttttttatgttctgaaaatagaatgcattttttatggcaggagagaaatcaatatcatcacaggaatcatcatctcttttatgtagaattttgagaaatagaggtttgagaaccaagttacagaggattaaattttcagaacctcttacaacattaaagggctgatgagggccagtgaggggatgccactctttgaaggaaaagctcctagctacacataccatgctccctggcttcagtgcctcgcctcagagcctgttgatacaactcttggcttccaatccatttctttctgaaatacattcatgtaggacatgaaccaacaggctaaagaggaagggaagaagaggcccatgggcccccaggcagagctggcttggttcccatggggcccgttgcatcacagcaacttgctggggtgttgttctgagttggccaggcccctccataaagagcccggggtcatttaattaattaggggctttgtttgcaagatgggtggcatcaccgtggtgactgtcctcggccagaggctttttgagtgaaagccacatggtgatcctgggagctttggaccggtgtggcctcggtggggctgtgccttgccccacactctgtgcatctcccaggcaagagcaggagcactttacagcctccagccgggcttggctgcctgctcctgctgcaggcggcctctgggctcctaggtaaggagagatcccctgagctgcctctgacttcgtgccctgcagctcccgtggaacgtgcctgggtatgagatcacaccttgtgaatggcagggaagttgccagctcgtgttgctgggattaggatgcaaacttgttctcactaagtgatgctaatgccatatttatgactgtgtttcttccctgctgctcagccctccagtccctccttttgggacctcacatatgaccctgtaaaacttcatctgcttggaggggggtccatctcactaggctttagggaccctttcggatcctacaggagattctgttccctgtgatgttttctattcatcccaactttattcatagccttaaaaatcagcagcctctgggctcgaattctagctccactttttttttttttttttttacaggctatgtaactttgggaaatatttatctttcctggcctcaatgttctcatctgtaaaataggattgtaggtaggcttaaatgagataaggtccactggcacatgattaacacctaagaaatattaattattgctattattaagaatattgccactgatttaaaaatgttgagggtcaaagacgaagcactaagacctggctactccaagtgtggtccctggggctggcatcacctgggaccttgctggaaatgcagaatcccaggctggatacccagacctatggattcagaatctgcactttttcaagatgcatgggtgactcctatttgagaggcacttcaagaatactccttgaagtccagcttatatcaatgaatgagcatgcagggagatggttgcaaaaggaggagggcagggattctcttggttagagcctcgacgacatacaacctgcccagactctctgccacgcccccaaggctggtcctacactacacaggcgtcctctccataagacaccaggacaccctggggctggccggatattaattttaacctgcttttgccactgtgcaaatgtggggaggggaggatatgtgtgggggtggagaggagccaagagacctatgatatgatttgctgtgggctcattacctcttaagtgtggtttataatcactgccattcagtgaatactgtgtgctggggcctttacttacctagtttccactcctcacaacaaccccaagaaacaggattttgtaaccccattttacaggtgaggaaaccgagacctgggaagtttgggcttgcctgaggtcacccagccggtgacagtctgagcatttactcttctactctgcatcccccagcccttcctaggtcaccaagctctgaacacccacagcagccaatgtgggagaggatgcccagcaggccacagagcaggtggtttttggtgattattcaaaaaaggaaaaacctccaaccctcaagaggaggctgtgcctgttgcatgtaacagaattggctgggctgagtttgcctctgaaacaggcaggcactgcagggcgggattcacaggttctccaccaaacctgctgctgcagaaggtttaaacattaaaccataaggtggccttatttaaaagcagaccattttataaggcacatggtactgtctagacttgggaacatttatgaatgtggctgtactgtgagtcgggctcaaacacctgagttccctcctcctctcaggctctctgacttgtacaggaacaaatgggatttttaggggtggagggtgtgtgatttcagacatttggtaatctcttcctgctgggccccttccttacctctgtgtttctttgtagatgtgagaattgaggaaaactggagaggaggtttcctccgcaatgccgggcatgtctgtgcatttctttggtagccctggccatgagggtaattatgtaattactggtgtgagttttgcttattgcccgtaccctccccaccccacctcccaccttgagggctggagcagtcgcgctggctcccttttgtgtagccggtacttggtaggttttcaaaaagaacaagtggatgaacagtcaaatttcataaaggctgaagtgtgaatatcttgaggctgagttttgattttaagtaggaacatatttgtgccctgttcagctgaatggtgaaaggagacagtgtgggagcgggtggagaaatgctcctgggattgctttttgggttcaagatgttcatcctcctgtctggtttggactcaggagccctgctgataatggtgtgtaaccagctgatctgatcttcctgatttcagatgaggttgcaatgtaaagacccaggatggagatgctcttgtcctttatgtactatgaaaacatgtccctaagacctccactcactgtctcttgaggagccaggaggaattcaagtttgctctgaaaaagaaaggaagaagggaaggttctacttacagaacactcactctgggttaaaaaagactgacacttatttagcagttaccccctggcccaggtgtattcttgagcacctgatgtgtaatccttaccaggacctatgaggcaggtactattatttctctactagatgaatgagaaaactggtgcacagagaggttatgtaacctgcccagggtcacacagctagagggtgattttagcctggacttaaagccatgttcctaagcattatgcaatactgtctgtgcactggctcagtgtatccttcaacttcctgaagcagatacttttgcaggagctgcgttagagattttctttttttttttttttttttccttaacaacccttaaacaatatgacaatcattcttagctccctgggtcctacaaaaacaggctgaatatgtggctaataaagtagttggtgtgaaatgctccagagaagataaaatgggaagggtatagagagagggaggtggccataagtgtggccttatcagctagagggatcaggaaggatctccctgagagggtggtgtgaagctgaggcttaaatgagaagggtgcaaagatccctggcatgtaaagcattcagcacggtgtctgctccatatattaagtggctaatgaatactggccattactattagtagtagtagtgcttttttgttttgtcattaaccggctgtctgaaccttggatgggtccgccaccactctgggagtagagctgaatgtcttccctccagccttggcaggtgcacagatgagagtgatttctagcatttgtctcctcctgacttcctgtcacccctttgaaacaggggagcagaatgcaccctcttttacattttcagtggaaaaatcattgtaggaaaagggaaaatttttgtggagagacagccactatgcttattaacatttatggagcccttttagtttcctcagtgctgagcaaggcttgatgagaatgtgggcactttccttttcacacccagctgaaagcatcccctggcgattgcaccatgggaccctccgcctcgctggactgttagggggaatcagcaagtgggcctatttttttaccctttagaatgttgctaccctcctctgaccctgcatggtgaagaatttatgcctattgtaacttgacaatagagcctccttgaggccaagttcagcttgctgcataatcaaaggggtggtttctaccctcggccatctttagtttatggaggaatgtaggagttgttccagcagccacccacaccctccacagcctgtgtgtgttcactgtctgcttcctcccagaacaaggtcccaggattacagcccttcctcagataaaataaagccatccagtcatatctttacatttgacgtaagtgaagggaagtttttcttgccctatactgaatggggctgtggtgaggacttggggtagctctgagtctggctctctgctgaaaaggggcctttaagctggaaggctcattcatctccatgcagcctccttctatccagccatgggtccacccagggtcgaagggaggtggagcctgcccctgggtttacagcagggccccctgtgttttatatttgtttagctattcctctattgcctgtgtagatagatgttaaaggaattcttaatcttcttactattatgcttgtcgtggcagtattatttaactggggtggttccccctttttttttccccagttctgctaccacctctctggtctgagcttgcatcaattaataacagcaaccctcccctccctctagcttccctcctttcctccttcccttcatctttccttcgttttttatctacctgcctacctgcctacactaaatgttttcccgggtctaccgtatgccaagcatggtgttaaggactggaagttaaataaagcagtgaataagatccctaccagtgtagagtcaagtaaagacacaaatgctgatttaatcacaactggggtaaggactgcaaaggagaaatcccaggagctgctagtcagacataacctgtcttttgggaggtcaatacatagcaaaaacagtcataacagctacccagttcttgttgagtcatagatggactgatgcattttagaaatgtttttgtttgtagtgcttggtggagagctggtacaagtcagaagtagcacgtgctcctaaaagtgaatatattcctgctgaggctggctggggttgactgtgtgataggcaaggtgtggccgtgggctgctgataatgaggactttctttgctccagatgactgtatgcctttataatccagaaggatggtttagctgcctttcccctaggaaagtttacctgacctccacaggtgagagttgaggtcacaagaggaccagcctggaagggaactaggcaggctttctgatccggcagcaaattgattggtgggcttctttgttacccgtggatactcccttcctgaagtagtttttggcccccttagagccaatctgattaagttactgaccagcttgtttatgagcaaagatgaatccattggcgaacacacttttccttattaggttcctattgtcattcattgcctttttctcggtgtgtttcttttgagtaattgctccatgtgttggccctggcaggtctctgcagtttgcatttgcaacattggcactgagctttgggaattgacaggggccgggcagggagatgagctgtcactacctttgttttaccctgatttgtctccagaagagccctctggtcataccatgtgctattgaaggtggcttgggcaagaggaaggatgtaggaaggaattcgcttctgagcccttgcgtaaacacagcatagcctggagtcttaaaagccgaggcttgaggcagagctggcctcgaggttggccaggcagtaatgattttttatagccactgctgtggcagctgcacagtggaactgagtggtaccaatttcacctaaccatgtttaatcatcagtaccctgtaaactgaacttgcctttttttcttttttcaaagcatcagggttcttcgagtaaacgactctggccatgttaagcagcctctgctttatgaaaaaacaaaaacaaaacaaaacaaaaacaaaaacaaaaccaccatcacaaatcccaggctgtcaaacctgatgttttctgttgccaggagaagggtgtttttgctgtgtatgaaagacatgacaagggggcatttccaagctttgttttggttattgtcagttctgccaacaagtaacatctgtatttattttccaaactcccccaatggctgatttgcatctgtttagctctctgaataacatttcatttcctgactttataggttgctataaaatccattcgtaaggacaaaattaaggatgaacaagacatggttcacatcagacgagagattgagatcatgtcatctctcaaccatcctcatatcatcagtatttatgaaggtcagtgattttttttttttttaacccccatatcagttaccatttctcataccatggggcctgccaagactttgagataattgcccttctgggcagaagccaagtatttttcctcatgatgcaaaaatagtcgggtgttatctcttacttggttaccttgaacacaaccagacacatgagtgcagctcattttggtcataaaatatctctggcggataccttattctgtcttcttaattccttggcagttgctaagcaacccaccttattgaaagccagtttgtgagacagccctggtttctgaaaaatgacagtttgctgggtgaccaaataacagtggatacattgtaaatgtcattccccaaagccagtcgctttgctggtggtacggagttactccaagttaggttctttgagttagaaattaaccctgagcaggtccagtaagcaccaagaaagagggttggtgcagcagatgccttataaatggagcccaaattgtgttggtgtttgcaaaaaagagcagcatggggaaaagcttatacagacgctcaggcttcagttcaactccttggtccttcatgagaagaaatggagagaataaaccgcccacagactatcatttatgttttaagaccctgtaaataaattacacagcagtatgtgtttattgtagaaatgattgaaatcgaaatgttaaaattaaaaaataatttctgttctaactcccaatttgataaatagctctctatccatatctctatatttatctatttctctgtatctatttgtggtttttgtccagttagatcatgctatttaaactgttttttagcttgattcttttttcatttgttgtctcgtgcatcttttctgtatcaataaatattcccctgtaaggacatttgaaaaggttttatagcattctgtttatggacataccataatttattgaatctaatttcttttgccaaacacttaagttgttccaaatttctggttattataaacagggcttcacaactctccttgtgcatcattttgacattcatttctgattattttcttatgaaaatttcccaattttggttttactgagtcagagtgtttccctagaatatttaaaaatatgtggctgaaaaatgaacttattgctgggtgcagtggcttatgcctgtgatactggcaccttgggaggctgaggtgggcaggtggcttgaagtcaggagttcgagaccagcctggccaacatggtgaaacccgtctctactaaaaatacaaaaagtagtcaggtgtggtggcgcatgcctgtagtcccagctactcaggaggctgaggcacgtgaatcacttgagctagggagacggaggttgcagtgagctgagatcgtgccactgcattccagcctgggtgacagagtgagactctgtttaaaaaaaaaaaaaaagaaaaatgaacttatttttaattcgtggtcagattataagaagttatcaggttgggctaaaaggaaaccaaccagtggtgtccctaaagtttttctgatagttttcgtttttcatctggttccctgatctttttttgccattctttttttctgctgcttctatttttgcctcttatctagaagtaaatgttggtaatatatttcttttatcctggtcatttgaaggctcatttttggagcccttggtgataggatttttaagggaaatttttatccattctatcttttatttacatcacaaacacctcttacagtgcttctcaaagtgcctgggctagtggcatgagcatcacttgagattattagaaatacagattctcaggcttcacccaggacctgctgaatctgaaactctctgggtggggctcagcaatctgtgtttcaacaaatttgagaaccactagtctactgagtggagtgtctacttcgtgttaagcactctgttcagtgaagttagaaatttgaaagctgaatgtgatatggaccccacactcaagaagcaacatagatcccacactcaagaagcaatacaggctggacatgatggctcacgcctgtaatcccagcactttgagaggccatggcaagaggatcacttgaggtcaggagtttgagaccagcccggccaacatggtgaaaccccatctctcctaaaaatacaaaaattacctggttgtggtggcatgtgcctgtaatcccagctatttggaaggctgaggcaggagaatagcttgaacctaggaggcacaggttgcagtgagccaagattgtgccattgctttccagcctgggcaaccaagtgagaccctgtcttaaaaaaaaaaaaaaaagaagcaatacaaggcagtatggaaagagtgctatgtagcaatgtagtttgttctcatgctgctataacgaactgcccaagagtggtaatttataaaggaaagagatttaattgactcacagttctgcaaggctggggaggcctcaggaaacttacaatcatggtggaaggggaagcaaacattccctcttcacatggacagaggaaggataagtgccgagtaaaagggggaaaagccccttatagaatcatcagatcttgtgagaactcactcactatcacgagaacagcatgagggtaactgtccccatgattaaattacctcccaccgggtcccttccacaacatatagggattatgggaactacaattcaagatgagatttgggtggggagatagccaaaccatattagtaggcatgtaagcagtatattctgggaccatgttctggaagcttggggattggaagttttcatggagatgtatggcatttgggctgggtcttgaaggaattttttgataggggaagaattgtggaaaatagaattccaggctgataagataaaatctgaatatgtccagtgaatgaggggaatttctagaagttggaagtgagtagagagacaaagacacaatgtggaagtggaagtgagtttcgttaagctccgtaggccatggtgaaggattgacctgtagggtgtggagccatacaatcctgtgccctgagaacactattgtgttttgggatttcttggcccagagcaggagccttctttatcaggaagggaaagagagtgcattctcagcatgaaggttccaggttctttatttgagaggcagtctgtggttgctggcgtcccacatggagaaacctgacttcttcaccagcaccatgccctgtgtggccttgggaatcagacaggacgaatggagaacaggaaaccatccccctggcaaagagaagatcagagacaaaccttaacggaagaatatttagttaccaacgtgaagttggcctcagtagagaccgggctggaggctttaaggagaagagaagccctcaaggctcttgcttgtcactttaaagatgcatagcagtgtgaggaaggtctttaggttactagaaataatttctatcaaggcctcaggagggagctggggcttcagttggtgaaacccttaggacaggttttagggagttaaggaagacttgaggtctcacatcaggaggtcttgagcttcagcctccagtcctccactgtgacctaggcacaacacttggggtaagatggtaggcttctcagtgcctcagtaatcacatctgtaaaatggggatgaccattctagctctgtcatggggttttcagtaggattaaatggcatgatacatgtatctggtaagctcaaaaaagataattattatgaggacactgtaatcatcacaaatagttcataacgtggggtccattgacaaggtatttcatggatgagctgcagggatctgtgaatcccttggaatagtatgtaactatgctgtccaacacagaagccactagccacaggtggatatttaaatggaaaataattaaaacaaaataatttaaaattcagttccccagtcacactagccacatttcatgtgctcagtagccacaggaggctagtggctaccatatgggacagcatagctgcagaacattttcatcttcatagaaagttctgccggacagtgctgctatataatgtttcatgtgttgtgtgcatgagttacttttttctgagagagggtacatagctttcatcagactctcaaaggcattcctgacctcaagtaggttaacgagaatccagtgcctccaagtgttttgcgacctatagggtatcatgcaaataaaaggtgttgtttttatccagaaaactctcggggtcttacatgtgtcctttttctttcttttaatttcttagagctctccagtttctgttctgttccctttcccttctcccacgcaagttctgtttctcccacatccactaaataactgtggaggagggcagctcccctcccttccctgggggttgggagcaggagattgccaaggctgtattccagctcctacacctctcactgggaaccacagtcccaggatcccatgactttatctgctttcctgcccagcaggacccaaagatccagcgctgaacgtgaagttagacatcctgccatctgtagaactcttcatagtttacaaaggcctcccacatctggtctccttttatccccacagcaaacctgtgaggtgggcaggccagggattcccattttgcagttgtggaaactgaggctctagaaggtttaatgacttgctggatgtattagtttgttagggctgtcgtaagaaaataccatagactggtgacttaagcaacagaaatatattttctcacaattctggtctgagtgtggtgagggaaggatctgttccaggcctctctccttggcttatagatgaccgacttttaactgtgtcttcatacctcttcccaccacatgtgtctgtgtccaaatttcctcttctcatgagaacaccagtcatattggattagggcctgtgctaaggacctcattttaacttatctccgtaaagacactgtctccaaatagggtcacgttctgaagtacttggtgttagggcttcaacgcctgagtttttgcggggatgcagttcagctcatcacactgggggtcatggctacgtggtgaccctgacatatgggtctcctggtcccctttgttttcttgctctgtcgtgcctcatccgtatttctgatcctgtgtcttctcttgctggctctgcaggccacctcagcctggccttttccatcctgcccctacctgcccctgctgcaacctgggggcgtggtgggggcaaggagtgtggcagcagtggtggtgggaccccagtctgtgagcccatctgctggtctccctgctactcacagaatgagaggggaaccttctctctggaagccggttggtcgacaggccaatcaagagccttagctcggtgcagaaatgcattaatttgcttagaaagaaattgatgctaaggcaccaaagtggctatttggatactagccaaatgagtagaagctgttaaagaacttgccagtgtcttctttagcaaagatctttatgattaaagagtcaaatgcacacacacatagtgacagcaacaacaacaacatcaacaaaacaacaatagcaacatgacaatgcaatgatgtgcctaaccctgtatgtttagaaagtgtgggttttaatgaaaggaagccatcatcttgagctgtactaaccggtgatattgaaatactagttctagagaaaaagcgatttattcattaacaaaaatgctaataaagtgcttactatgtgccaggccctattctaggcactaggaatacaagggccaacaaagcaagctcctgtccctcttggaactgccattaaagagaggagacagagagtcaacaaagtgaacagaccaggcggtccctttcggactgagccttgagctgaaggacttttgagtaagtggttattgagtgaagatctgaatgaagcggagactaaacacttcagagtcctgggaatgccatacaaagggaacagcatgcgcaaatgctcagaggagagaaggcacttatatgggtagaagggacaaaggatctgggaggttggcaggggtgaggagaagggtagtaggagaaggaggtggagagggctagatctggaccacactggccagaggaaggagtgtggattctctttcaggaatggtgggaaactgctaaaaggaggaagtagcattttttgatttatacctttaaaataatactagggctgggtgtggtggctcacacctgtaatcccagcactctgggaggtcatgttggtagagatggggtttcatcatgttgcccaggctggtctcgaactcttgagctcaagtgaggtatttttggtagatcctctggcctcacttgagctcaaaagttcgagaccagcctgggcaacatggtgaaaccccgtctctaccaaaaatacaaaaaattagctggacgtgatggtgcatgcctgtggtcccagctactcaggaggctaaggtgggagaatcacttgaacccggaaggtggaggttgcaatgagccaagtttgtgccactgcactccagcctgggtgacagagtgagaccccatctcacaaaaataaataaaataaaatagtactaataatagctaggagttattgagtgtttaccttgggctaggaggtgtgcatgtactatctcacttaacccttatatctgggaaatatgaaatgttaagatccctattttatggtaaggaaaattcagctttagaggcaaagtccattttctaaggttaccaactaataagtggtggatccgagaggtgaacccaggcagcaacactcagaactcggtgctcctgatactaaccaggtcatttggtggtctgcagagacccctaactggagggaagtattgttcttgaccctgtgatatgtagaattcccagtcttcatagaggttactgtcttacatatctgagagcattcaatcctagctttgtaggcattttagaaaatacttctgccagcatccaaggaagaaggttggggttcaaatctgttaaactcataggtcaagtgttttctaaactgcagaacaccatgaaaatttgatttttatataatcacaatacccccaggcccataaaatctgtgacttcactgaagtgatgctgctgttcacccaatctcaaaaataattcctttcaaatgtgtctttcttgaaccaaaccctggggttaactctcctattgacccatgggtgaaggtgattaaccctcaaatttgtcaactctgtgtaaatacaaacgtaactggcttctaatgctaagtaaataaaagaggatagacgtacacttttcagtgtgtgatactaaggaaagcctaatcaagagaaaagaaagaaatctctggcaccatctcaaagagggacccctgtttccagtcaaaggaattccattctctcagcagggaggtaattgacaatatggaaaaaaaagctgaaaaggaagtgcccactggagctttcaactgggttgcctaggatggaagagataaaaacagtttttgcctgaggttctgatttcaggaccgaagttcaaacatcaaaggcgcactgtctcacccccacttcccctttgaaagcctaggagacccgatctgcaaaaccactgagaacaaacatctttagcatcccatctggtaacagtccggcatataaaattgaaaaggtgggtggaggggtgggggagattcggcctgtgacttccctttgacacccttggttttggtttctggaaatctctcctcttggccatgcaagattgcatctctttatgggttctttgcattgtgatgtgctggaactggccaaccctttcatcacttctcctattttagataagggtgatcctggctttctgggacaaagtaggaagcctctttggcatttgttaactgtgatctctcatccgttggaagtgtttctccaacttgaaaagaaacgaaatagacaaacacgtcctttgataagcatttgaatctgatgcccccaccctgtgagccttaagcatgctgcccacgagaagataagttataataagtctgtattctcaaatattctctgaattcccaccatgaagacactttggatgagtgcactatcagttaaaagctcctctcatcttactagagaaattgcactacaatatgcttttgcaagctacctgtgctccctgagatttggataggtctttctgggaggagataccactcttggcgaaaatcactgctctaaaaatccagagaagcagaagagaaatcaagagacaggggctgtggaaaagcctgtattccttattgtacacggcatcgcccccagcccctgccctgacccccagctcgtggccaggggcagtggggcttgtgtaagatgtttctgcagaacccagcagaggtcctggaatcagaaagtgttgctgctccatcctgtgcccctggaaaatcacctcttgagaatggcaggcccctggtaaactgcttaataatgcatttgagcagcagttctcaaagggtagccccagacctgctgaattggaaactctgggggtgggttacagcacccagagtaatcattagccctccacgtgtctctgatgtacacccaaatttgacaaccccactgtactagaaaaacccctgcagagaaggttagaagcaaaaccttccaaataattgattctggtttccttagaaacaaaagcagggctgtatttctagcatcagttacttggaaatatctacaaacagtttatgtttctcttctcagacacaactgtgctactccagggttctcaggcaggaagatttgcaagcaggtcctgatataggttcttttgaaggcagggaatggctgaactgatctaacaagatcaatgatccttaacattatccactattctcattcattcatttgcttatttagtcattgaatcattcatgtgttttacaaaaaggtattgagcacttttgttccaggtactattctattagcacttttgtttcaggtaccattcattaaagtaatggtgaaaaccacaatcagttttgcatgaacctaatagtagggcaagagtataaatttgtcatccacgtaggctgagatttgagtgagccaattgcactgctagttactgcagtgtgaccttgggctagtgactaagctctctgaggctgtttccttgtctataaaatggggccagtagctagctgctttatagataatgtaggattaaatgagctaatgaataaaattgctaagtaccgtgccagggccatgctcaagaaatggaattgattattcctgatgtgatatctagggatcagtgagatgtcctttctggctggagtagaaacttctgtcgggagattggagaagagaagattgaggccagcttgcctatcagtgattctgaatgatggaggcacattaaaatctcatgaggagtttgtaaaaaatgctgatgcctgggtctcacccccaaaaattccagtttaattgaccaggctgagaaatacaggcttaatcctgcaacaaagagaaaacgagccctgctctggaaacttgtcttggtctgatcgtttgtcatcagtgaattccagggaagaacgtgtgtctggcggcggtcaccagtgagcagtgaatgataccttcgggcttgggtttacttacttagctgttgggttgctgccctcatcagagactcagagccccgtgaaacagtttgttgaacttggcaaagtagtgtattatgcttgtgtttactcctttgaacccatggcaaatagttgagcattttaacacactccctctgccgccagattcacacgttccacatgaagtccctgcagactggatccaaactgaggactcgcccttattcgtaacacagcaccagagagttctcttcacgtgtaatcatgtgaacgagtgcttcagctgtgagcctgtccagccacgtttctaatgagtttcctattaagttagctatttgaccttcaagttattattttcattgttttcttttgattacacccaagtcatttttctagaggctggagatcagaaacaaaacagctacaaactaatgctactcccaggctgtcctgcctcaccctcctgggtttcctggaattcaatattttctagtgccttaaataatgacacttatacttgacactaatttttaaagaaaaaaaaaagactctattgccctttactatggggtctttcggaatgaactgggatagctttcttaatttgcgcaggcagtcaccagcatgcatttgggaaggctcacagagcacagaagaggggcctccacaatggccatgtacaacagtggggatttggatattgaaaggggggtcagattagatgaactgtaacttttaacctgccgagtctgggaatttttttgattgtgctccccaccatgacttctgacagcaggtgcctctggtaggtatggctcagagattgacacccatgcttggaacagccctagggaccaaaagaatgaaagagagctaggcttgccttcacctcagcttttactgggggtcactcaaatcctctgatgtctttaagtgttcattcactatttctgccattccttcacctccaacccatcacacacatacctcaaggtctcaaatgcagccttgggtgtggactctgccagtgcatacccataattctggagttgatgtcttccttagttcccctttgctgctgaatcggaacagctaacacttctgcgtacacttgctgctgtgtgctaatattcacagtgagacgtaaggtagaggcttcattttagcagaggaagagcctgcaggtacggaaaggctaagtaacttgcccaggtcacccaactgggaagtggctggagccagaggtgtgaggaccacgggcctggcctttccaccttggtgaggtggtgatggtgagatgaatccctgtgccaaagccctctgccagggtttccaggggtggaagactaaggctgtcttcacagaggtatttctacccccatcactgccagaattggggagcatgctttttcagaagttcacggcatcaagtacaagaacccttgcttctttctgggggtagttgtgagaggttctgatcaattgccggggctttctcacattcaggattgtgtgagtgagtgtaatttttttgagagagaaagagtggtgtgtgtgtgttgtgtatgacacaaaagctgagacagagcaatagagggaatgatcagggaggctgtggagttgtgtgtgatatggagtgtgtatcatgagcctgtggtgatggctgatagcgcccgtttccaccttagggccctgcatggtttctagaaatgctccccagggatggttgtggaaggagggtggagtccagtggctcgtccagtgtggtgttgtcaagtcccctctcccacacaacttctctctctatcctggccacgtcccctgccttcctaggattggatattgggccccattggcactattaatcctagcaggcacggatgggtcttggcaaggcttctgcatcccctcttctgcaggtggcttctacactttcttaccatttcttctgccttccgtggagtccacttctggcagtgggtggcctcattggctgtggttttcttcgggcatgccagccaacatccagaaagagttttggttcaagaaaagacagtgagtgaacaaaaaagtcttttgttgtgcaaaccaggaactgcactgaatcaactcggaccgatttattgacagggagatgccagtttaaatttctcatcctcactgctctgggctttcagatccaagagatcagaggacgatttagtgaagctgtgagcccacgaggtgtttgaaattgacttctagggaggaaagttttgaagaatgagtcttgtattgactaaatgactcaactggtttgcagacagtctttcaaagaaaagatcacttcatttttgaagtgataagctactttctgtgaggactgtactgacctttaataaaagagcacccttgaggagtggaaaggtactccggtccgagattttgggaaaattacaaaaatgctgctgcctagggaggcaatgctgtggaagaaatggcagcaccctggttgtcacctaggagacggacctgatggaaggcaaaggtgtggagagaattctcttggggccactgctaggccctaggcctttttttttttaaatcaacagatgggctgggtgcagaggctcacgcctgtaatcccagcactttgggaggctgaggtgggcggatggcttgagttcaggagtttgagaccagcctgggcaacatggcgaaaccctgtctctaccaagaaaaaaaaaaattacaaagattagccaggagtggtggcacgtgcctgtagtcccagctacttgggagactgaggcaggaggatcacttaagcctgggaggcggaggttgcagtgagctgagatcttgccactgcactcccacctgtgtgacagagcaagaccctgtctcaacaaacaaacaaaccaaaaaactcaacaaaagactcttcctccctggaggttacagaaagaaattgtccctttttaaaaactgacccttcctggggcatcctgtaaattcatcctcatcctctctgctttccaggcttctttcttccaaaacagtccagtatattcggctgtcacgtggccagtggatgcttaaaatcccaggatctcctcactcatcagcgtttccctcagaccagagcactgtttttataatacacattttctcaagttctacaagttgtgttgttaacctcgagagctgcaggaggcagtctctgggagctgggtcattagcctggttgtgaaaaccagatgatcagagggcagaacgggactgtcaaaccgaacatctgatgaaattcaggattaatgtggagaagtagctgttgctatagcaaccaatccctactatcctttgaaatggaaaataaacagcaaacaagaaaaataatttaagttggtgtctgggaagaaggaaggcctgccagtggaatagtcaaagaaaaaggagagttcgggtattttaggatatgttgaaacaatggtgaaactatctcaaaagcaaaacccaggtcattttgggtggttcagttccatgcctgctttttctagaaatcttttcaggccccttctggctgacctcactgatctttctgattgtccaggtacttaaagtctgtactgtacaggttagctcttgaattattttttaagtactggtcatttccaactcgaaagcaactccttggggttaatgactgtgccttctcctcttttgtattccctttaacatgtaccaaaatgcccagataaatgcctcaaatcggctgataataaagccatttcagaaaaatcagtaagtttggctccatttaatgaaggagaacctttactggatgtaatgcaaaaagcagaactgtatgatggaggaagggggtggagagtcatggcgagaacatgcgcttttgagttgcacaaatctgccatccaatcttgctgggtatctacccaacaaaaatgcgtacagatgtgcatcaaaagacatgcacaaggatatccacagtaatactattcataacaaccctcaactggaaacagcccaaatgtctatcaacagtagaatggataaataaaccacacgatacattcacataatggagtactctagagcaatgagaatgaacaatctttgacgacattgagcaacgtagattattctcacaaacatgttgaattaatgacaaaagaaggtatactacgtgattccattttttttttttgagacagagtctcgctctgtcaccaggctggctcactgcaacctccttctcctgggttcaagcgattcttgtccctcaacctcctgagtagctgggattacaggtgcccactaccacgcccagctaattttttgtatatttagtagagacggggtttcaccatgttgaccaggctggtctcggtctcctgacctcatgatccacccgcctcggcctcccaaagtgctgggattacaggcatgagccaccacgcccggctatgactccagtttttagaacttcaaaactcatctacgattttggttcatattcctcatattcatggtattggtgtatctgtatctttggggagatgattaatgacagaaagagggcatggcaggggtgcttgcagggggctggcaatattgtttcttgatgtgagtgctggtgccctatttatttatttattttattttttgttttagagatgaggtctcgctatgttgaccaggttggtctcaaactcccagcctcaagcaatcctcccatctcggccttccaaagtgctgagatttcaggtgtgagccaccatccccggcttggttccctatttataaagtagggataatatggatccctatctcataagattattgtgaggaataaatgttttaatccatgacatgtagtaactgttcaataaatattaactattcttattacaagctttctagggaaggagagatccctgtctgggaagtctcctggaaaaaattgagccccagacaatttcacaggtccaggatcctggatgctgtcctgtgccttgctcctgtctcttggattgttctcggcgatgtttggttgcctgtgtgactcacctgcagctccttgtgggctttcaaggtcttgtgttttattcatcgccgtcttctttctctcctcctagtccctggccctgccagctgctggcggttctgtttctgctctgttcccttcctcatgctgacccttctacctggcctgcctttccttcccctccaaactgggaaaagtcttctttcggtatccccagtgccatctgcatagtaggtgctttctgctgtgctaaaaaccaggctgtacaccacctggccatggccccagtgctgtgggctgactcaggctgagctaagtttctattcagggatttaattttcctggtaggcctggcatgtcaagggccatagttttccttaccattctggagccaccgggcctctgggtaaaactgtctggccaagagacacaggctttcatttttcagaaaggaaacccttcccaactggtggaaaataagcttttgcttagtgactaataacataaacacagacaagatttctgggcttataaataaccagttgtaaaagtgcccaagggaagcagcctttttttgctagaagaatggccaagagtatccctgtcaccttgtagatagtgaccttaagcacgggcaaaggagcgttgggccaagggtgtggaagctgctcattcttcagtattaattcccaaggccttgctcttatacattataaatcctggactattctggaaaaataacacccaatctctaaggtcctttcctgctcgaaaatcctgtgattctgtggcagccacaacatgttttaaagagcgatgccagcagggagaggaaagtcttagggttttgttttgctagagctgcctaagtggctgatgaagtaattatgagcacagcttccattcgttgagcactggccggggcaccgtgctgagggcgatagacctgtgaggaaattactagtctcattggactgatgaggaggcggagggtcagaggggttgatatatatgagtagtaatggaatggctgagagcttgggggtagcagtcagactgctgggcccagtgctggctatgcctcgtactctttgtagttatgggaattattattcaccttgtcgccccaggtgttctcatctgtaaaatggggatcctcatagtaccgaatccttatgatgtaattcatgcagaatgattattagcatggtgcctgcacatggtaagcctacagcaaattttgctgttattaagaaaggcttcaagaagcttcatctgtaacagctctggcctccttgatgaaacactgaggcttgaaatctagaaatcttctttgctctcaattaatttaaggtgacagggccttgaccgtgagacttgggcttcttcctatgggggactgggggatggtgtcccagagccaggcctggctgctcggacagttctctgaccagattgctcactggccctgcctgagagaatgaggggccagttttatccctcgggtatcatctcattcatccagtgtttcccaaactggctccatatgagttcttctggatgccaataggaggattgaaatggcccaatcaactggcagaactctgagttaaggaaaccaggctctctgaggaccatcaagtattaatgtttggcttgggtttgactgtggaattttttcttcttcaagatagcttgcagaatgagtactccatggaatatgcatttggaactatttcttgacccctccaaatgcagtcagcagggaggcaagtgtgaggtctggcaaccagaaaggatgggggtaagggatgtccttggaggtgagacaggtggacagatctgcgatatattttattttatttttgagatgaagtctcactcagttgcccaggctggggtgcagtggtgtgatctcggctcactgcaacctccacctcctgggttcaagctattgtcctgcctcagcctccccagtaactggggttacaggcacctgccaccacacccggctaattttttatatttttggtggagatggggtttcaccatgttggccagtctggtgacttctggcctcaagtgatccacctgcttcagcctcccaaagggctgggattacaggcgtgagccaccgtacctggccagactcgggatatattgtagagacaggatcagtaggactgattgatggaagctgcttagtaaaatatttggtgtattggactgtattgaaccgaattgtgtttgtgtctccttgataccaaatcagccagttggagagggaagaatccagccactgaaacagcccttctgtctgtgtgaggcaagtggctcacacctcccgacagtcgctgaagggccagaggctttggctcccttaaagacgtgccagactctttggggtgtgagtcttcttgtttatttacctgtcaaagtactttccttcttcctacatccctcctttttaaaattagaaaacccgctgccctctccagggcctatcactctttcatttttggggcctgggccatgcatcccgaggcagtcggggtgtttccagtttccaaggtttattgttaatgaaaagtgcacaacaggctgaaatccctggcaggagccaaagctgcagggtacaccgaggccagcagacgctggagcagccaattttatctggatgttctctcctcctcctcctccctaccctcctccttcccccttcattttatcagggaggtttggctggacttgaaggagccaaaaaggaactggaggggtctgagcttctagcagccagcaacaaggtatgggaggacaggggacccaggcctagggtaggttccaggtcaactcagttcttcattgaatgtgtgtctgccttggtgctaggctctggggatgaattaatattgatagcaacaataatagctaacataattgagtgtatgctgtaaggggaaggccttgtaaacattgaacaaactggtatcaataagtcctcccagcagttctaagtacttgctaatattattcacgttttgtagttgactaaactgaggcccagagagggcaagcaacatccctagaatcacacagccctaggagtatctcattccaacactatagtttttagctctgtccgtctaggcagaggacctgggtatgtaaaccaagaaataaacctgcacagtttgcacgtgctatgaggcaagtattgactagtgcagtgggaggggcgctgtggaaaccacatatgagcacagtcttggctaatgaattagggtgctgggcatagggggcctgatggaaatgttagaaaagtggatgagatggagggaggtaggcaggggaccttcagggagggtcttgggtagcctacaaaggtttttgtactatatcccttaagagtgatgatggatttcaaaacaaatattgcttattttatccttgctcaaaggacatcttatgtgaaagtccaaagtatgaaacaggtggcaatggagtggctttggacagcctgtcatttgtggcctcccttctccctgcctccttgcatgggtccctggccatctgcctggaaccctgactttgaacataacggctagagagcatcagcattgggtagaaagaagcatttacaagcatttgggaagactgtttccttggtggtgtggaggttgagtgagaaggggctggacctggtggccgggaaccggcttgagatcatagtagcagcggccctgcaacctgcggcattagttccccatccatgctggggactggagccctgctgattccagccagctctttgggaggccatctcatctggtagttctgcacttgatctttgacgccaaactgcctgattgcaggccgtgccagtttcttaacctccctaggcctcagtgccttcatctttcaaatggtaaaattacagatatttccctgattatttgtcatagggtttaaatgagtcagtacatgtgaggtacttaaaaccttacacacaaacttggtgcacagtaagtgctatattgttatttattattaatgttcagaaatgcctttatgtagtttgagtttactcatttaataaatattagctgagctcctactatgttactctgtgccaaatactgttctgggtgctgaggatacaccagtgagtgaaacaggacaacccccttttacatttgactgggggagacagaataaataaatacatggaatgggtgtgtagtagggctgagaggggcccatgggatcgtgcacgacttggtgggccacattaaaagctttgggttttatttgcctgagatgggaagttataaagagatgacaagattgagcacccattttggggtcagagtagctctgtcagggccggctacctggtccgtatccagtggttaataaattattggttgtgtttgttgttacccatcatcctgtctacaggaaagccgttctgggagagggtatgagaaatgatcttgacaaggaaagtggggtcctcagaaaagggaaccacatttcccttagcatgacaaaggcgtgtccaggaacagtggtggtgacacacaccattttccacctggcgggacagcacgccccacgcctcgtgatgctgaattggctgatttgtgttctgacccatcagtcgatcctctgcctggcgacatctccgttgtcctctctcgcattctctgtagcataagtgagcttgttggctaaacggggtgtttgtgtattgctgttttccctctgcagtgtttgagaacaaagataagattgtgatcatcatggaatatgccagcaaaggggagctgtacgattacatcagtgagcggcgacgcctcagtgagagggagacccggcacttcttccggcagatcgtctctgctgtgcactattgtcacaaggtatggctgcgcctggcccgcagctttggccgtagatggtttttatggcactgcatgatttttttcctattataaaagtgatatctgttcatgggagcatgtatggagaatttatgaactagaaagaagaaaattaccatcacccgtgattctggaatccagggataatctatttttgacatttttgcttgtttcctttcagtcttcttcctcctccttctcacatttatttttttatgtaaacttttaattttgaataattttagatttacaggaaagtttcaaaggtagtacagagagttcctatctatgcctttcttagtttaccctaatattaacatcttacatttctgtggtacatttgtcaaaatggagacaccaatgacctttttctgttccagcatccaatctagggtaccacggtggattcatttttacatcgtttgtgtcatgcttttttacttaatactttaatctaaatattttcctatattattaaaaattctttgtaattcttgattgttggacattgagactgtttctaatttctgattatgacaaatagtgatcagtatctttatatatgaatattttcctctcatgtgaataatttacttaagagagattccagaagtagaattactaggagaaatgttcttgaaacctttctatgctcttggtgccttttcttgcataggttacctacatgcacggatgtgctcagaagatggccgcagacaggctcatgcctataatccaagctagttgggaggctgaggggggaggattgcttgagcccaggagttcaagaccagccagggcaacatagcaagatccatctttaaaattttttttaaaaagtagccaggcatgaggttgcgcacctgtagtcccagctgtttgggaggctgagacaggaggatcccttgagcacagcagtttggggctgtagtgagctatgatggtgccactgctctccagcctggatgacaaagtgagaccccatctccaaaataataataataacaataataatatagccacagtagagccactcttggtttctggaaaaggcataaagtacacagataactacaagccatgtctcagccattattgttattcatcactttggccatgaatttcatctcattcagactttctccagatctgtcacaccctaaacagtcatttactttgaggataacgtgacttgagtccaacagggcatccaaaacagagtcaacttcttcatataaatgatctcaacatggggcctcctggtttgttaaatattatgtttaattgagagtggctctgtaagtaattagagaacagttactcaaatctaaaacccttaactcatgtgaacattatttgacctctctttgttgactcaaaatgtgctcatgatttgaatcgtataatattttgtatttcatcatgaggtatcattgtaaatcaccacagaggtgatatttttgatattggaagtgtgtgaacacttggattctgtatgaatgaggctttattagactcattccatcttattacaaaaaccaggaatgcagcaatgtaaaccaaactgctcctgatgtttaaaattaatggaatcaggtgtcttgtagtccacatctttcttctaacagactcggttttgtgcatttctgaattcagaagacctcattgcaggcttgaattagaaaaagattagtagaaatacatgttttcatttctccctctgagcagtgcttttggagatattaagaatggtcaaatgaaaaggaaaataaacaagaaagaaccacccataaacatgcctgttggtttgctcaaaagagcagcttcgattgcagatgtcctttatgctgaatgatgttcagaatcattcaatgtcccctgttacttgtccactcaccccaaaatagccagttctttcgggcccactgctcttcccatgcccacccaccccctaaaaagataatcgggtcttaaaaaagaatgaagaaggctagtgtttactgctgtgtagaccgacagcctattggctgatgactgcttttcacgtttcagctggctggctgctggtcattgaagttcagcctccagccttgccagagtttgcctgaatggaaaggtcaggcaggatggcagccacctgctttggtcaggccagtggtcccagtctcattggtctgctctcatgcttcatctttcacccagccctgagtcctgctgagcagagagggactttctgagtcttctctccaggttgcttaggaaatgttatcctcaggacagatcaaaacaggtcggaatagattgagccagatgtctttccagcgttgagtaggcaggcaggcacacagacagacagatgaggagtgcctgtgagccccacaatcttgagtccccagtagagaaatctgcttcttccctgggaatcccgtccagacagacattgtttgctgctgcctgggattatattgctttcacacagtggaattacattccgacaaagaatccccctgctgttttacaggctctgggggagaacagattccagtcatttttcccttaaccacacagcaagtgactaatgctctcctgtcgctggttggtcgctggcgggggagcgtcaagacagtgagagcagcctgaaggatggaggtgaagaccaccgggctggtgcatttctttaatctgtcagacatttccctttgctcaccctcctccttcctctttctctcttgttctcatcccagccgctcccattcaattccctctttgtcttctcatttcagaacggtgtggtccaccgggacttgaagctggaaaatatactgctcgatgacaactgcaatattaaggtaaagcccttgcgtcgtcgattgatatgcagggcctgggtcttgcagccggatggaggcttaacctgctccaagccgcagcctggaaataaggcagccacttcctacctggcaggctggtggggaagagtctctttgcttgagctccaagtccagttcaaacaattaaatgcgacaagcagttattgatctcctactatatgccgggcattgttcttcctccctgggtaagatgagatgactgagatacagtgtctctcctcaggaagctcatagtctaaaatcatcaccataacaatacttttagcaaccaatacatatttcatatgtattttatatttttgcctgctatcacttaaattcaatctttacaacaactctacaaggtaggtactgttatttacataatttcacagatagggaaactgaggcacagaaaaactaagtaatttgcccaaggtaatccagtggtaaagagtagagttgggatttgaacccatgtctgtctgatttcacgagcccaaattcaagtcgctttgcttgatttgctagcaggatcctaaattattttagagctggaactctttgcctggctatttctttgtcactctccaccctgtctcctacttctccctctccaccttcccacccctgaaaccagccatagacctgggaagctgactaaaatggggatggtgcttgctgttgggaaatagcaagtgctggagtttacttgcacggagagtattattgctggctgctgctggagctggagaaagttctcctggcccacagggttcaagtgcctcccagggagccctctgaatgtccttttgaccacgtctacaaaataagcaaatacggtttcaaaataaacggagctcgctgcatgggtttcattatgaaacggccttagtactcccggcaccagcaggagccctccaattggccgctggtgacgttagtggcttatccctggtccctgggcaaagcatgggaatgatttttttgttgttgctgctatcagtggaggagcgtgtgatgagacttgtttccttgcttggaaggatggagttgctttggtgttgggattctctgtacagatcatggcagcaaccattagtcaccatcatcctttgagaggcccctggaagccatgacccagtgacctcttgctcttgcagagtgtttgaccgtagtcacatgtagtctatagaataagcaggaaatagttggtcaaagtagttctccatgggaataggaagtggaatcgcagggtctatttctggcaaagtggttggattattctagaaggagcactggttgtagagttaggaaattccgggctgtatggcttactagcttcttgacactgggaaaaccacttaaccctgtttcctcagctgtaaaacggggtaacagtactactcacaggcctgcttagagcagtgaatgagacactctgtgtttagttttgtaaactgctaagcactcgtgtccaaatgagtcaaagttaaaagcagtggctttggagttagatatttcaaccctgccccttagtaatggcaggatttggggtaagtttcttgatgatttaggctttagtttcctcatctgtcaagagttgccagttcctgtctctgcagattattgtttatttgttcatttttgtttcaaggagtattttctgaactgttactgtgtgcaatgccctgtgcccagtcctggagagtcaataataaacgtgaagattttagacaatactacaatcaaagcaattcatgcttaactgttactatactgggagccttcttaagtggctggccactggagagggaattgaaccggaagtcagctgctctgaaggtgcctacctaggtcctggggagtggtggtcaggccatggctgaaaaattggtcttggtttgagggccaccacatttttctaagggtttgtgtcatcaaccttattgacttcctctccagatccttcctgccacctgcccccagagctctcaaaactaaatgtcatctttacaaggcctggaatgtaagcctcttgcctaggggttgggttctatggtgcagtgtgacctcttggtcccatgatgtattcccagaagtgataagacacatagctttctatgaaatcatgtaattccctaatggaggaaaagaatgattagaattctgaaagcaattgtgcagggaaacagtgaggcaggagcccaggagaatggcttcatttgtgtaagcaaaagggcaatgatgttgggcctgacagttcccctgcaccaagttcttcaacctagggtgcctgtgcatgatggagggaaagagcacacacacaaagcagtattatcaattaaggcttaggcatatacctttccttaagaatttctaatcctggcatttcccaaggtaaagcacgggtgtgcatgcacacatacgtcccaaagagaaaccagatcttcccattatcaacacttttaaattcctttcctctttgttcaaggaatcctacttaggtctgagaatcctacatctttaaagaactttgggagtcatttttccaaccccttgttttaatgattagacccagaaagtctagaggataatgcccacgatcacacagtgaatcagtctggactaaattattgtgtctttgcttccccagagtgtagactagtgcttggcacacagtaggtacttcaaaatggtttgattttggaataaaggaatgatgagccaggattagaactcatgtgtttgacttccaggcaaattatcttttcatcatctcccatccacttccaaggttttaaaaaaatgtgattcagctggtcttgatttgtcttctggtggtatattctcaactcttcctgactcagcattttgctgaaacatatttagaaaggacccatgctggcaaaggcaggcagatacatggccacaagccggcctctgtgctcaagagagcccctgccatccgtgtctggacctgggggaccacagacacacgagccacgaaccagcgggacatgagcagcaagatcctctcttggagccccctctggtgcttctctaaatgtggatccattttccacgtttcaagggtggaggactttggcctaggaagcctatataaatgctactggtttaaacttgtcacatgtcgctgcagtggtggggagagccatgtagctcattcctctccccttccctgcctgatgttgatttgcagagcacacatctggcattggaaattatttatctggcactgcgagagggtgtggtttctaaaaatattcacacagtcggtcagcagaaagaatgagagcaatgtgctgctttgggctgcattccgtactctggaagcatgtctactaaaatagacaccaagcacagcactaatttgcaattaataaaaaacgggccaaattcacagcccactctctgggagaatggaatgctgacaattcccatagaaggctcctgtaaaaatgtcttacaatgagaagaggtccaggcaccagggtcagccgacctcctccaagagggctgggaatctggtgagctcccagggctcagagtagaggggcataggggaaatggcctgctgccccttaagacaatggaagcgcggctgctgtggataagaaaagaagctttgaatggccagggccaagatgagatagaaacctctgaagcttaataagaccaagtggggcagctgagagtcagcctctgggctttgatgatatgaatgggagagctctgtgttcatgcatgaattaatcaattcatgtgttgtgtgtatatatccacgcatacctgcattcactcatccattcctgcatttattcactgaggaattgaacgtcttttctgggcaatatttatttgatcagaaatattcattaaggtcctactgtgtacttgaccctgtgctggggatttaatagtgaactagatggccaaatttctgtcttggaactcaggatctcgcagttgttaaactagcagtgataatgagccgtgaggaggatacagaagtcagtgaagaagagaaggtacctgctctagtgagcttaaaattccagttggagacacagcagtaaacaaataaacacataatgtaattggctggcagtgaagaaaatccatgcaggatgagaatgaagaatagagttgctcttttacctagagtggtcagggaaggcccctggtataggacttgaattcctgtcatccaccaagctctctctggcttcttgaccttggcacacatggttcacactgtctggaatgctctgctcattcctttttgcctgctccttctttggggtctctgcttgactgcctcttcttccaggaagccttccctgatccttctcccttggcagggccaaatggccctgtgtaatgtattctggaagtgctgagcaggaagcagtgggtctgtctggctggatggaccagaaagctttcatggaggaagagggattgaattgggttttgagggatgggtaggagtttgatagtaaggagcatgatgatggcttttcaagaggaagaaacagcaagcacaggaacacagcatggagactagaaaaggaaagtaatgcttactgagcccctgctagaagctagagccccatgtcagaccttccacaccttatttcatttggtcctcagaatgtctccaccggggtgggtgtgattacatcattttacagaagaggaagctcttgcagctaataagtgatgggactggctacaaacctatggctatttgactctaaagaccagacacctgatgaattctactctctactcttactatccaaatttgccatacatctaagagcacatcaaatgagggcactgtttggtccatgctttggtcagccttaccttgtctgcaggcaggcttgcagacagctatcactgcgagagactctccaagtgctaatggtggctgatggccaggctgagtcatggtggccagagtagccatgcggggatgccagggctgtgtgctgtgagctggcactggctgctaattaacatccatgggagctgctgcttggacgcgccctcttttaagagcctcctcacattgttcctggtgggaatttcttttcttttaagagaggcagcatgagcttagatcctctgaagacagaagccgaccccactcacttctgctccttgttccactccctgccttcacttcctggcaactcaggagtgaggctgtcttgagtgaagccacagcgatcaactccaaggccggaaaggagttatggagtgtaccttcctggatggaattgctgtcttcccgaagagttacacagaaagtgcatttcctcgtcagccacctgacagcaataactcccctttatgtagaactttacagctaaggcagctgttcaccgatgtctcaggcaagccagtttaccaccctgtgcctcagttttcttatctgcaaaataaggataattttagaattccactatctgcaatcttccagatagggttgttgtgagaatttactacatcaatatatgtagcactcacagaaccgtgcctggcatatagcaatgctgctactgttacttttatttttagagacagggtcttgctctgtcgcatagactggagtgcagtggcaccatcatagctcacagcagccttaaactcctggcctcaagcagtccccctgccttaaccttgaaaaacactgggattgcaggcatgagccaccacatctggcctattttaattcttttcttgtttaatctggctttgattttcacagcaccaagtgattggcggtattgcaattccattttccaacaaaggaatctgagactcagagaggttaaataaagtagtcatagctaacatttactgaaggcctactgtgtgctaggtaggcatggtgtaagcacttccatgaatcagtttatttggtttggtaccagcacttccaggtaggtgacattattatcatcaaccccactttacagatgaagaaatgcaggcttagaatggctaatgtgcaagtgcgtattatacactggggctcttgtgaaaatgcagttttagtggatctggggcagggcctgagtgtctcagtttctgaaatgttccgaggtgatgctaatgctgctggtccgtgggccagattggagtggggtgggattatctaaagcgccttgggttagatgctggtacgaggcaaggctgagatttgaactcaagtgctcaaaccctgaatcctttccttttcccatcctatgatgcagcttctcactctgaacgtgactgtattataaatgagtggtaagatctcctggctctttaatgggcagtggctttaatgcttttggttccctgtttgcctggtctaacaaacgattgttaagtcggccaaaccatcagccttaccataatggctgtaatttatagcgtcagctggtcccaggactattccaggagctttacatgcgtattctctactcttcttacctatgtgaggtgggttctagtctgagtgccattttgcagatgaggaacttgagtgacttggcaggtcccacccatcacctagtaacgacaaagccatgattagccccaggttctcctggacccaaaatgtctgatctgtggagtgcaccacacttcctcttaaacactgcagatgactgttagaccatcactaattattatcattgccatcagcatcctttcctatcagttaatgtcagcaaggtgacacttcagttttcaccagatgagctcattataaacagtgttctggagttaatccttttatggtggtaaaatatatgtaacatcaaacttaccagttttaggtacacagttcagtggcattaagtatactcatattgttgtgtaggcattaccatcatccatctctagaatgttttcaccttccccagctgaaacgctgtccccactgaatagtaactcccctttccccctcctcccagccactggcaacctccattctattttccatctctgaattcgactactctagggacctcatgtacatggaatcatatatgtccttttgtgtctggcttatttcacttagcataacatcttcagggttcatctgtgttgtagtgaggttaatccttttgaaatgtgaatgaataattacttcctcatttatctttctaaccccaattttcatgcagtggggaacacctctggaaaggcttgataacaataaaaactccaaatattaaggacccgagccttgagttccggggctcctttcgagaattgaggctgaactgaatagcacagggcaggggcagaaggtggttctgaatcagtatggggcaggggagcagtcaaaacaacaagcaaaaatgccagctaggtaggtacctttctccaaagcttgcctgctagtgtgtcagcaaaattcttcagcccagtcgcctccttgctggaaagtcatcctctccatttgcagctgatgttctgttggagaaactgtacggcttgggaagacccatgtgctccttcatgtacttgctgctgttctttgcaacctttagcaaaacttcttatgccctggaaccttcagctgcttcacttttagagcgaggggcaggattaacatctgttagggctctttcaggtcaaagtaattctgagattttgttttatgatgtttaaaatcagtatttctcaaatttcagtttgtcatccttttcatggatttttgcctttccgcagtatcctcactgctattttacttaatatttttgttgagttcaggtcactttttaaagttctgtctatttgaaaaagaagccctaaataattaccttaagtggaaaaccagtatcacttaccatgaatagaagataagctcaaaactaagtataatggaaaccaaatagcattctgaagttccagcttgatgttggttgctgctgcaggctaggccggaggcctggtctctttgataaatgctaaagagatactgaagacacaccagtgcccaactgagaccttcttcttgacttaatccaaagaactgaaggtgaatccagaaaggaatgaatttttcattttattattcaaagttatttaattccattattatttggcatctgaaatttctctatttcttcactgtcaagagtccctggcattgggataaactctgcttctagtataacgaaggtaattaactccctggatttaaagttgggaagcaaatatatattgagctccaactctgggccaattactgttgtaaggactttacatactttatgtcatttaatctccaccatgacacagtagggatagacactcttcctaacgctattttacagacgagaaaactgaagcttcagagaggtttcataaccagtggccatttcccctcttatcaatagttgatataagttccgtatggcattaaatcttagagccgaagcctaagtttgaatggctcaagatctgagaacgctctctctctctctctgtgtgtgtgtgtgtgtgtgtgtgtgtgtgtgttgattaatactgctttcccatcgaagtgccaagaacacaggctaatctagatttctattaatcttgtgtcagtggcaatgacagttttactgggagaggctgataaacatcagtctgtgaggataggagtgggccataacataaacacacttctccagaacggctacagagcaaatgaggctgcccagacttggaatgaaaactcctggtgtgagtgtgtgcatgtgcagcgggtgcctctcacacgcacgtgtatttggaagctcatatggtgccccaggcactgccaggcgggaagagaatgcattttcctgtgcgtagccattccatgcctcttctgattgacagggcacacttcataaagcttccaaccaacttcctgcaagcaagtcaggggccttgataagaaagtggaattcagggcaatgaagtgcaatctgagcccggagaatgcattttctgaggctggttgtacaccagctgctttcaatgacattccattcattcagggatgacttttacaaaataggctgcttctaggggctgtgaccaccacagagcctcggtggtattcaggctgggctctctctgggcatgtgaatcatgcagctcatttccaagcctcaaatggaaatcagcttggagaatgatggaaacctacaggggctcagcttgcaaggctggcttagagtggagtgaaatatacaggtgacccagggacagggtggcactgtggtttgaagctttagagacacgggggtttatattgctgcatattagttactcatctccttaaatgagtaacctcaaactccttaaacctcaatttcctcatctgttaaatgagtttttcaaaaaatgtgtggtaaagtggacataacataaaactgactattttaaccttttttaggcatgaaaggcattcacattgctgtgtaaaccaggtttttgttaagattagattaaataaagtgtttggagcagtacctgataattggaagttgttcaaaaagtggcaactaagtttattattattattattattttgcattatatattaattatcttgtgcttttcaaaatataatgcctgtaccagtgacaagtgtttcttgggtgtgggcaggtgctaagcagtggatgatacaaagataaggggaggatgtggaacctgccaactgcctcaggaaactcagagtctggtagggaaagcaaatatatatatgtatatgtatgtatatatgtgtatatgtgtatatttgtacatatgtgtacatatacatatacatatatatgtaaaagtgctgtcataaatgataacacataaaacacttcaagaaaccaaaggagaagagaatgactccaaggtgtgtggagtacaatgaaaacaaggctagatgaaacatttgcatcaaacttgaaggttatgaaccactgttacactcacggtgtcatcttatttttttttttgagattgaatctcgctttgtcgcccaggctggagtgcagtggtgtgattttggctcactgcaatctccgcctctcaggtttaagtgattctcatgcctcagcctcccgagtagctgagattacaggcatgcaccaccacgcccggctaatttttgtatttttagtagagacggggtttttccatgttggccaggctggtctcgaattcttgacctcaagtgatccgcctggccaaggtctcatctcgattgatttctttttcttattattctcatgatgatcctgtgagctagaacagggaagggatcatggattcccattttctggtgggtaaactgaggctcaaggtcattaagtgacagataggagcagagttgggactgaaatatgatgactcaaaacccaatgctgtgagtcaattagtccatttcatcttgagtcacaagacaggcaaaatacagttctgatcagggtgtgagtggatacagaggtggtatcaccagttgtgtaggtcagggtttttccgcagtgtgatatgcacaccaccgcagatgcagcataattgggtagaccacagagggagaattcttaaattaatagttacacactttaatgttcatcagaaacatcaagccagtgattttgtgaatgttatttctcaaagcaagtctaaattaaagtttaaatagagcatccatttaaagagtaatttctaagtaagttgcagagcttgtagtctgcagatttggtagaacttgtgatggatgccaaggactgcagctaggaaacactgacctgcttgggctgagtggtcctttatgaagactcagggctggagagaaaatggcgatccagccagcagacccacccaggtgcccttcatccactctgtgtgctgtgtggtgtgaactgatccaacacagacataatctggaatgctaacaagtctccctgggtcttgcttctctttgtagattgctgactttgggctttccaacctgtaccagaaggataagttcttacaaacgttttgtgggagtccactctatgcatctcctgagattgtcaatgggagaccttaccgagggccagaggtgagcagctttcccaatgtgtatggggcaggggaggggagggagaagagggaggaagggcaaaaactggattcgagaaatgcttaaaaaaacagagcctaaaaaagccagcaaggaaaacgtttccttatacgattataaaagcagttaatgtatactcctgggaggaaatttgggaaacccagaaaagcctaaaggagaaaataaaggtacctgccatccccctagaaaagataatcacttaaaactctagtgacttttaaacttttcccaatgtagatctctgcatttcaaaaataattgagatcaagttaataaaaggcaagatatacatatgtatgtgacacacgtatgtatatcttgccctttactatgaaaactatcttgtggcaatttccaaattcattattaaaaacatgattttaatgacattttatcaatgaatataccaaaatttatttagtaatgtctagatgtgaacatttagttttttccctattatatcaaaacagacaaaacaaacaaacaaaaaattgcctcactctggggtaaatatcttttttgtatatatttttggcagcatgcatatctgactaaggaaatacattttaatgacatcttctaattcatgagaaatacatttccctacatgctagcgctttcaagggccactgtaagatatgggtatatggaaattttattttgaaaatgagtgagttgtgagtgatgattctctttttgaaagatggttctcttttcagagttcatccactcagtatcctttaaatagcagctgctcagtgtgttgaaatgttttctttcaaatatttatgtgtttgagagtgtttgggggcagggctgaagggtaaagagaaggatgccaagaccatctattaactgcaatgaagagaaagtctttctaaaataagaatgtgagggaggagcatagaactcaatttacaaacttgtagaaactcgacacgaaatttctcatagataatgaatattttggtcttcgatgacctgtttttgaggttccaggctagcagtctgtgatctggtcagcaaactcctttatttggccaccttagtttttattaaaaaaattgaacaaacatgtaataattgggagatttcatgtaaaagtttggtttctgacttctcttgtaaaaccaaagaatcgagcagtgctgggcccatgttactacatggcagcaattagctaaggagaggctgtctgcctaagacgggtgaatgtactgtacagtttgtctccatccccaacactctatgtcataaccccaattctttcttgctttgtgtatatctgttaagatttcagtttgtaattcctgattcatttgaagaaagtgcaggaaggaattgattcctggattaggaatgaagagccccgcatcccagttttacctccgtcactggggcagggcctctggagaaaccatttaggttcttcgtgcctcagtattctcatcttttaaatggggctgaaaatagtcctggctctaactgcttcacaaaattgtagtgaggattaaagaagataatctgtttaagaaagttctttactagttgggaccactggcctctgttcagaatggaaaggtcaggctctgtagcaggtcccagctgcattgctgtcaggtgtcaggctgcactaggaacctatcttccaggtgctaaattcagttcctggggctgctgggggtggctgctcacaggctatgatgctaatggtttggaaggcatcttgggatctgtttcccagctctcctatatgtgctgtctctctgctccaggtggacagctgggccctgggtgtgttgctttacactcttgtttatggaacaatgcccttcgatggtttcgatcacaaaaacctcattcggcaaatcagcagcggagagtaccgggagccaacacagccctcaggtgcgtgccctgtggagggagggtcagaggtggaggggagagagatctgcttacccaactcttattttctgcttttgttttagtatgtctgtctggagtcacctggttttcctctttcttcttcccagaagtgtcatccttggcaaaactggcttattaggctgctttccccaaaccttcccaaaggaaattttcagagcacaccttctaggagtcctgtttgcttgctttgtggatctggacaagtcacttaatctctttggattcagattctccaccataaataaaaacgttggaaaagatattagatgaggtctctcccagtctgagtagacatagaaaccactcacctgagaatgtaaatactgtgagggtggccactgctctgtctctcactactgtgccactggcatggggcatggctcatgggttctgtctcattattgatttctgtgtaacaactctaccccatctgcccctacaaaacaaactcagtggcttacacaaccatgaaatcatctctttcacccctgtgggttgggaagtgctcttatggccttcctctcctacagttgtaagcagatggcagttggggctgctgctggggctgaatggtggaccttcctcagtgctctctgaggtgccaccccacagtggcagcttggggttctaagaaggaggaataaaaagttgccgagctttctttctttttttaaaatttttcttgagagagtgtctcgctctgttgcccaggctggagtgccagtgccatgtccatgcttgtacccagattgtgtcacatctgctgtgttctattggtcaagacaaccacggtcatgagcttcatctcttgatggggaatatcatgcctgtatagagagtgtgtacagctggccatcattggtcatttttgttaacaaatgaagttaacattggcacttcatttatatacatactatacacacgcatatatatatatgtatatctgtatacctacacatacacagttgattctcattcatagtagttatgttctacaaagttgctacaaacactgaatttgtgaatattgaaccattgctcttaggggaaatagagggttaggttcctgagagcctctgctcacaatatttttgttaactgattgatatataaccttgttttatgtgtgtctctgtttaaagacaccttatttaatctatattattaattcattaacatcaaactcaacagccaacagcactgtaactcatgcctaaacaaaactgatctaagacacttatcttctccataaggcacatcacagccttcttgagcttaggaacactgaacagtgcttcagcactgttttagggaggcatttaaaaagaggaatcaccaataaaaattccaaaaaatgtgagaaatacagcactaaatagactgagaaaaggacaatttgtataatagtatgagaactgaaataagaaggcagagtgttgccttgtttgacctccgctgtgaatacatatgtgtgttggggtgactcaaactttttgctgctctgtgcatatgcaaaaatgactgcaaaagagctgcgaatattgattttgaggttaccaataaattttagcaagtaggcaaatttgcaaatacagactctatggataatcaggctagacggttgtatgtgtatatatagatatgcattatctctctctctatatataattttttcaacaagccagcctgttctttttggaaaaattcagagtgacctctaaagtggtcttctttgcctcaccagctaactgatgccaatgcggttcctggcacattgtaggcgttcaagaaatacttattgaatgactgaggatgatcatcttggtacttttcaggggtgtttcttgccccagtccctattaccaggcctttgccagcttctcattcgcttacataagcagctgaggggaggtggcagcttccaagaatataattcaccccaattgggggaacacagtttgaacctaaaagtcagtttataagctgtgagagtcagttggttcctgtggccttctcagcatccctttaggggttttccctaattctctggcagcagaaatttgcaggtagaatttccagacaggctgtgaatgggaagcagatatagatcacttctctgatctgatagctcagtagaagatggcttatgtcagagagggaaagaaggcaagctcactgagtgttggtctcagaacctggcctggaccttggggcgaggccagctttggagatggccacgcttactgcccaggtgttccaggtaagtgcctctgagccacactccatgttctgtctctggcatgctttcccagtgactgcaggtgctgtgtgtttatacaagcccacctttggaggaataaagaaagccatggttatctacacctgtttttcctctggtaaaatgatattcgccaaaggaatggtggggcacctctcagggtcaagtctggattctttcttggttacctgaccttccacattttctaaagattcaagatgatgaaaagcttagtagttctatgacattttctcacttacagggaaaacatgccatgatgtgatggcaccctggcctgtggttccaagtcttgattatgcttttgatggatgatctgaaaggctggggcttcctgctccataatgtggctggaccaggtctccagatggatttgtcctagagggagtgtgtgtctttcgtcactcctggagggtcccactatcacaaagccagaagctcccacataatgcccgattctttttgtcccttgtcccttagatgctcgaggactcatacggtggatgctgatggtgaaccccgatcgccgggccactattgaggacattgccaaccactggtgggtgaactggggctataagagcagcgtgtgtgactgtgatgccctccatgactctgagtccccactcctggctcggatcattgactggcaccaccgttccacagggctgcaggctgacaccgaagccaaaatgaagggcctggccaaacccacgacctctgaggtcatgctagagcggcagcggtcgctgaagaaatccaagaaagagaatgactttgctcagtctggtcaggatgcagtgcctgaaagcccatccaagttgagttctaagaggcccaaggggatcctgaagaagcgaagcaacagcgagcatcgctctcacagcactggcttcattgaaggtgtagttggtcctgccttaccctctactttcaagatggagcaggacttgtgcaggactggcgtgctcctcccaagctcaccagaggcagaggtgccgggaaaactcagccccaagcagtcggccacgatgcccaagaaaggcatcttgaaaaagacccagcagagagaatcaggttactactcttccccagagcgcagtgagtcttcggagctgttggacagtaatgatgtgatgggcagcagcatcccctcccccagccccccggacccagccagggtaacctcccacagcctctcctgccggaggaagggcatcttgaaacacagcagcaaatactcagcgggcaccatggacccagccctggtcagccctgaaatgcccacactggaatccctgtcagagcctggtgtccctgccgagggcctctcccggagctacagccgcccttccagtgtcatcagcgatgacagcgtgctgtccagcgactcttttgacttgctggatttgcaggagaatcgccctgcccgccagcgcatccgcagctgcgtctctgcagaaaacttcctccagatccaggactttgaggggctccagaaccggccccggccccagtacctgaagcggtaccggaaccggctggcagacagcagcttctccctcctcacagacatggatgatgtgactcaggtctacaagcaagcgctggagatctgcagcaagctcaactagcattccagggcgcccaggggcgggcgggggtacgagggaggaaggggagcaagacttgggctcacaggctggttacctctttgctggctgtgacaacagactgaaaaaggattggcactgtctcacttggccaagtttgcagccttgagccaacacctaaaagggagaggtgggctcttctgccagttctgtcaattgtcagtcagaatttgggccctgtttggcatttgctttatggcacctcctagaggaccagctgtccaggggaggtggtattgaccggcactcagtgggtggagaggaagcatatgtggaaggagcatttccttagaagtcatccagatgcttctggaggaggggcaggagacacttgggctgtttgccttgggtgagcccaaagaacttgccccttttctccttgtattagcaagctaggtctggctgcgtggagctggcaagtagatttcagcaacttgagcttgagttgacgatcaattaatagtggctgccagttgtgctggcgtaagtggcccacatcatggggaaggagtgctgtgattgactagtaatggctaccacgggaaagggaaggggaagcagtagcactaatgctatgtagttgtcatctttgatctggctaggccctgggaatcgggtttagtcatcctgtgggatctatgttaactctttcatgccactggtgaggcatttgttaatttgctactcaactttgaggaaagacagggccttggtcagagagagaatgctctgaactctgctaaggacatagagtcagcccatggtgatttagctccttgctgttcacctcctctttcctgatgtctgccttgctctacagcacaacctcttgagggtggacagggagaaagatgatggtgtcagaggtcaaaactattatatatgacagggcacaagatggtctgtgatctttgcacagatgaatggaagttgatgcacaccaacaagaggcaacttgtcactttctttctcaatattaactggaatgctgcctcttgggttctcacctgcatggatgctttgagttggacgtgatactgtccatattctccagaggattacctggctgaaccattggctctgttcaccagtgacagatggtttccccatccactgagtgtagcatcctcagaggtaggcaagtttgcttctagggagttagcatgtagatgggatattgggatgaggaaaggaaaatcaggtagatggtgctttttttcccccaaatctaagtattctatgtcatggttttaaactttgccatgaactcctgggctttgggggaagagaaagttccattcatttaaatgaataaggtgttgaaagagtgcagggggttgggaggaagcatgtaagagagggaacatttccttagatgttacccagatggttctgggggagacagaaaagaggtgcggcaggactcttatcttaaaaagtaaacaaaacaaaacaaaacaaaacaaaaaactagatatgtaatttctaaacacccagatcacaatgacaagatgccactccaaccatgggacaccttcatgatactaggtttgtacttcctggtctctgggatgacttcagattctgctggccaaggcaaattgaactcagttcaagatggccaccactggtagacgtgtagatagaaaagaggactggtcttgggaacatctttggaaaaaccaacaaacaatagttctagggagatgagaaaaaaattcaccttacagtgctaagaaagtgcattagaatggaattgccctttccttaaggagacagtttgggctctccccttgccaccggctctggtgttttggcttatgcgttccttcaggttgagctgagcagtgtgttatgggaagctgctcaatttcctttcattcaattccacctccttcctgaactctaatagaggttaaaagggaaaaaaaaaattctgtagatagcaaattgtgtgtgtgggggggggtgggggtgtgggtgcatggaggacaacctgcaactctgagctccctacttcctgcctcatttcatgcagtcttttctgaacagcctatgctgctgccctgctggccccttgtgcacggcagctggccgtgtccgtagctgtcagtatgacttagatctagctcctacctactggttgatgtgttttttccttttgccaagtgattgagtctgtttagtagtttccatcattctagtctttaagtaaaaatgacactattgaggaaagtcagtctactcccttcttcctccccccaaacacgtgttctcttttgtcaggaaactcagccagtggactgtggcagagaaagtcctccactcagaggcagagactgagttaagtcataggtggccttaggcatctgcattgtttgcaggggttaagttttccttccagtgagggctggagggatgaattagctggtacctgaagccccgcttagctctgacactctgccaacatcctctgattctaggtgtggtgttgactgtcctttcaaggaaaaacttgcaatagagggaaaagccattaaagcagctccctgcttcatcattaagtcctgtcatccctaccagccaatcccagtcaaagaagttatgctttattcacttctgtggaattacaagtgagagacacttttaggacctgatggacaaagcaggagattcactgtcagctttcctggtcctctccttacttctgtgggccttgcaccgtcttagtttacacatctgccaaaggggtagaattacacttctttttacaggtaaatgtcaaggcacaatcagttttcaggaagtgcttcaagaccccaggtgaaatgaaaatgctaagtaccctctgaatggccatgcctgttaccaggtgctgcttcttcagatgatggggagcacttttcagggtgaaattcaggcgagttttgcccaggcctgctgtcttgagtacaaatgtgaatgatcgactgactgcttgttgccaaactggaaatgttctgtagggatttactggcatggtatcattcctagaagaaaaaaagagagaaacttgactgcacattaaaaaaaaaaaaaaatccacattgtgacttttatttaatttctattttttttggtaataaaaagttgacttttttatttgaatttgtcttttttatttattggtctgaaaggcatttcaaaggtattataataatatattggtgtaatttaattggtgcaacatgctttatggctcctgtcaaaattggttttcactcatttgattggtttgagcccagaacagcctacaggggaaaaacaagctggataaccacccaaagtgtttgtattttcgttggaaactgatttttgtttcattttggtttttgtttctgtttttatttttaaattaaataaattgcaatgaactgaaccagagaccttgcttctttatttggtggttttttcttagtcaagtaagtgacagaatcaatataagtaacagagacctacccaaatgagcttaagcacaaaagggaatttattcgaagttcttagaagaggaaatgcatcttgcagtgccgctggaattaagaattggagtggtggattgaagaggacagtataccctcttttctgcttctctttgcatatcagctttcttctccttttatagcctggctttcttctctctgattgtggaacccaccttggcttatcccgtagcttccaaatttacatgttctcagtcttggtttccaaaagagactactcaccaggttccttagttctgaactggagacgtcatcaaaggctaacactcagccacgctctttctccacatttcagtttcctgtgcctgccctttccctaggcactcccctctatcccaagggcaggaagttgctaatctgattgggattaatcagagtccaagatcagtgggtcacgatttcctaatggggaaggccactcacggctctgcctagaatgacagtatcttgagtcccattttgccactgtttcttgtgtaaatagaccctccagaaagctcttggaaggagaggtgcatcatagagcaagattgaagagttcctggatcctggccataatatcaggtgacatcaaaccctaccctagtatcaaacattagagagtgatgctgtgcacagaatagtagtgttttaggatccatgccagaaaagtctgactttccaaagaaattacaacttgcaccccttttctagtttactggaagaacatctgatgtagcattgtcacatttagcaaataaaactacagaatgcctagttacatttgaacttcacatatactatgaataatttttcaatataagtgtgttccagacaatatttgggtcatgcttatactaaaaaaaaaaaaaaaagaaattcaaatttaactgagcatactgtatactatctggcaacctaacctgatagggcttagttgtccaaattgaccaggtgctgggtgtggtaggaggttggggaatggatgcttataattgtggcttgccaaattagaacacgttggtgcctctcaggttgggctgaggttggaagaattccaagttcagtctggacttgataattgcaattaagttgctacacctttttggaactcagctttctcagctgtctaatgggtatattaattgctctcttatccaactctaacagggctacgaaaaagaaggaatgagagaaattctatgaagtcaccttgagtataaaactcaatatgaatgagaaacaatagtcctttctttgcagggcaatagtcactgacttaaaataggacatttaaaggcctgtgggcttttaattcttgcttcaacccctgccaccactagcaaatgggcagtaagttgcagttagaggggctgtaggtcatttgtggagtacgtttacttagaagtgtgacccttggaaaatacataattctgtatccaggcagaaagaatagcctgtgcatggcctagaggctggaccaaatgtgacatagtaagggtagtgaaaaaataggggtgactgtagtggcagcagttgacatgttgacaactgttgtggggttaatgggcagtggtcactttaaggaggaaagttgagagaactaacatgtatttaacttctacgtaatgcccactccatctttattcagtagcaaatggcagaaatccactcagaccatattaagtaatgattaatttactgcttcatggaaccgagaagcccaagtgtgtgtctcaggcacagttggatccaggagttcaagggatctcattggcctctttttcactcactctccctggatgaggctttattcttaggcaggccctctccacatggcagcaagacagctcctggccaaagcagggttatgacgcttttttagagtgtgatcctcaaaccagagaggttcttaatgtcctagcatttagggaacaaggaaggactgtgattggctttgtttgggtcatgtgtctcctcctggcccatcacagagtctgggtggagaagtgctctgattggccagcctggatcatgtacgcaccttgtggtatatttaaatgacacggaatcacacagaatgtgggagaacagctccccaaaggaaggaatgcagagccaacgatgttagttacactttttgggcctcaatttcctcacccatataatagcattaaataatcgctaattttcagagttattgtgaagattaaatgaaataaagttcctaacgtggtgcctggcacatagtggatttttaatttatacagataatctcagggaagacaacagtagtaatacattagagagaagatatatttgttaggaagattttagatgtaaaatcagctataatatcagaaaattcagctgaaattggcttaaacactacaagggctttatcagctcatacacctggaattctagaggttggggagtttcccagttacttgggtctagtgaaagaagttacatacacaccccccacaattacatatagtaagttctatggaagaaatggatatggtacagagatagaggagtaagggtgggagctacctcctgcagaaagagcattcagggaaggcatctctgaagaggtgacttttgggcagagatctgaagatgaagactagtcatatgtaaagtgagcattctgggcagaaagaacagtatctgcaagggccctggggtcttcacattagagctttacaggattagtttctggttccattggcataggacagccatgatccagggaacgtgatgttttgttaaacatgtgtggccacgttctaatatggactgaatgtgatcgtttgtgactttgtgtacagatggctgcttccttcaacaggtggtccccagacaaatatacatggctagatgtgtagttttaaatgagaattgtttccgctgcagaaattcactgccaatttattgaaatttatggagaggatgtttttaatctacagaatcatgcaaagtttggggtatggaagtggaacagcagcgttgctatatgaagaccagaaagtgcagacaaaggggttttcacgtcacaagccttgtctcctcctggcacaactgtctggttccagtagggggttgcctgggaaatttgcaatcaactttgttgtaaaatcatgagttattttcatcctgatgaaaaatttacacagcccttctctacctgactgggaatatccattgtacctcgaccagctggttccccatccactccctgtactagtgtttgtttgtgaattagtctggacatactatgttatgctgaagtagcagacaaaccctgaaatgtcaatggctcaatataataaacaacaatttctcactaccactaagtccagtacagggctgttctcttttcatgtcaccttcaagcaggtgctcaaacatctgagcttcttctatcctgtggttctgacatctccaggttcttcattgctagctgtgcaaatgaaggaaagagcagaagtcagaaccttttaaagatgaggcctagatgtggtgtgcatcatttgtgcccacctcccattggtcagaactcagccatctgacctcgacctaatcatagacagtcctcaagtctatagtacttaaaaagtgaaaagtaaaatggaatcagacgaacacttagcaatgtttctgccacggcttatttttgcttcccgggggaactctcaccgttaagaaaaataattattgttagtattaaccaagtgcttacccggcagcagtccgtatgcctaccctttgcatatattatctctttgaatgttcctcatgttcctttatctccatttttacagatgaggaaacacttttggaaaagtgcagtaacttgcccaagtcaaccaactgttaaatgtgcatctggattcaaatatgggcctgggtgactgactttcaagtccaagctcttagttgctctgttgggaatcagggatgatgattctgcaactcagtctcctcgacagtaagcccagcctgttgccatctctgttgatataaacagcattttcctgcaggagctgagcagatatcaggaacaaagacagttgcccaaatcaatgcattctccaaacaaacatggagaagagagcaactgtccccaataccccactgatgtgaaattctagaagctccagtctcagcagatggaattaatagaatgattcatgtttcttcactactctactgtgggatgggatggaggtgactccatcctgagcacctgcaatggctcagaattcagtaaaggagacagcaggcctccagtggctgtccaaagctgtgcatacacatattccaacagggctcaatgtggtctcttctgtgttgtggtgcctcaggggaccctgcttctagaggactgagagctcaaagcaacctggttggtgccatatggaaacacaggatgccaggctgtgttgcatggacctgcctggggtcaggcactgcaacagcagcttcatcacataaaaatctgtgggtcatcatgtcttcaaagcccagtacagggcgatgacgctggcatggcccccaaccagacttccagagaaacacctcactgtcagtgaaattcagggttggggacagttcattttggaggcagctggagaaaagggactccaaaaaatagctagcttgagaatgttctgcaagttggaagttgtgaatcactgaagctgaaaaacatctgattcagcagtgcctagggcattccagaagtttcagctgtcaggctttggagtccagacaaaagcatgtgtgtggagcagaaagccagatgcagacctcttaccccgtcctgctggtcatctccaaaggcatggttgtgggttcaattgctaggaagtacagatggtccctggaaatgggttctgcttagactggcttcttataaacacgtgtagctgagcactattttgatgaaggagagagacatggtggctggggtaaagttgcctcccattttagagaaacaacttataatcacattctcaggtcctttggggatctagagtggtgggatcatgttgcccatgaagctacgttggagctaataggagtgctccctgttgagaaggagatttcaaagtgaagaaacagattgaaagaggtgagttatccatcaagtttgcagtgcagtcatggcatgtcagtgctttgactagtttcatccaagatttttcctattcttgcaccagaagagaaagaaatacatttatttttgttttaagttacccagtctcagatattcaattatagcaacagaaaatggactaagatagtcattttcatattattgagttctaagagttttttgtatatactagacacagggattttgtgagatacatttttataaatatttccccagttgttgaatttgccttttatttttgattaatagagtgctttgaaaagcagaggctttgaatttagataaagtcaattttataagttttttaatggttaaggtttttgtgtcctatctcagaaatttttgcctacattcatgttgcaaatattttctttatgttgtcttttaaaagctttatatttaagtttttgcatttacgtgtatgatctattttaaggtaatttttgtttactatgtggggaaagattgaattttacttatttttttctgtatgagatgttagttgttggagtgctatttattgaaaagatcattctttctctgttaaattgacatagcacccttgtaaaaaaattaactatggatgtgtgggtctatttctgaccctgtattccttcccattaactggtcaatcattttgccaaaatcacactgccttgattgttgtagcttttagtaacttttgaaatcatataactttgttcctattttaaaaattattttggatattttgggtcctttgcatttccaaataaattttagaatcagttgttcatttcaacaaagcagactgctaagattttgattgcaattacaataaatctataaatcatctggggagaactgacatgttaacaatactaagtctcccaactcatggacagagtgtatgtatttatttaggccttcttttatttctctcagcactaatttttattttcagtacgcaggaattacactgtttttgttaaatttattcctatgtatgttatacttttgaactattataaatggaattctttacaaatttattttccaagtttttttgtggctagtatatagaaatatagttgaattttatgaattggctaaattcacttagtagtcctacctactagttgtttttaaagatctagtagaattttccatgtgggtggattttccattttaggttctctgtgtataaaatctgttctacttcttcctttttaatttgtatgtttgtatttcttttcctcgcctcattacaatacaacaaaacacacctagtgctaggatatccagtatcatgttgaatagacatagactgagcaaatgtctttcctcattctgaatttagtgagaaatattaagtctttcacgattatgtataatgttagttataaatgtcttctaccaagtcgaggaagtttcttttcttttcgaaatggagtctggctctgtcgcccaggctggagtgcagtggtgagatcttggctcactgcaacctccacctcccggggtcaaacaattctcctgcctcagcctcccaagcagctgggattacacgggcccaccaatatgcccagctaatttttgtatttttagtagagatggggtttcaccatgttggccaggctgatctcgaactcctgacctcaggtgatccacccacctcttggcctcccaaaatgctgggattacaggcatgagccactgtgcctggccagaagtttctttacattcctagtttgctgagagatttctttaaagttataaatgggtaaagaaatttgttaaatatttttcttaagtttattaggataattatgttttttcttctttactatgttaatatggtgattgtattgaatgaattttgaatattaaaccaaccttgccttcctgggataattttcacttcatgttgtattgttctttaaatatattgccaaatttgttttgctgatattttgtaaaagatgttcttttcatgcaagacattggtttatagtttctctctctctctctttaatgtctttggttttgtcatcagggcaatggtgaccttaaacggtgtttgaaaatcttgtcgtcctttctattgtctgtaactgtttgtgtacaattggcattatttcttcattaaatatttgatttagtataccagtgaaggtatttggacctggaatttcctttgtggaaaggtttaatgtcattattttttatcctttcttctattcaagtataggcaccgaaagctgtatggttttgtctaataattgctgaagcatcccacaaatattgacatggtgtgttttcattttcatttgcttcaaaatattttcagatttccatgttgatttcttcttttcatatttacttataatcttatggttgctgtgttttcactcttttgtgttccaagtctccctctggtatcagttttcttcctcatgaagaacttccatgaatatgtcttcttgtgaagatcaattagtgacttctctcagcttttgtttgtctgaaaaaaaatctttatttcaactctaagtttgaaagatattttttccagttagcaaaatttacatgacattttacgtctttatccctcaaagatatcagtcccctgtcttccggtttgcatagtttctgttgagacatctgagataatttttctctttgttctctgggtttatcatgtctgtttttctgtgcaactttgcatatttttcgtttattacttatttctttagcaattgattgtgatttctcttggtatggttttctatgtgtttatctttccttgagctcattgaccttcttgcatctgtaagtttatagatgtcataaaaaatttagattttaaaattgtcattataaattcaatattttttctgttcatctttctccttctggaactccagcaacgtatatgttataccgtttgatattgtcctacagctcagtgagtctctgtttatatttttcagtctttttctttttctttgtggctcctcttgaaattctttcatttctgaaagtgccatttggcgtgtgtgtgtgtatggtgtgtgtcacacacacacactatatacactatggatagatctatctatatgtgcacacactacatatatagtgtatatatatgttcctttatatatatattctttcattatactcatgtttttctttaaatacttgagcttgcatacctgaaaggttttaaagtcctttgttgataactcattcatctttacaatgtatagatgtttctattgattgatttttcttcttttacaaatcatattctctcatcataattactaattttttaattggaggctgggcattgtgtattttatattggttattgctggattttgttatatccctttgaagaatgttatgctttgtattggtgggtcgagtgacttggatgcaattcagcttgattcttttgaggctcaattttgatatttttaaatggttaatttaatccctttactgaagggcttatttagtcccactattaaggcataaagcttccgtagtgttactaaatttcctgtgtatttagcaatgtctctgtgttctggctggtgggaatttgaacattttcagccctgggtgagctctgagaattgtttggcttgcagctctccagtgattttttttttttttttctgttaatattctttgcccagcctcatttgcatgtggagattagtgtttagctaaagatccagagtgcccctatgcaaatttctggagctctttctttgtatagttccctttactccagtactctgtgctttccaaacctatctaccctggcctccctgatctctgtgacttgctctgtttgggttcatcttcctggtgattcagtccagaaattaattccaggttaagatggtgcaattgcctggtttactttagtttttgcttttattggtgattatggtcctgtgttacttgttgtttaatgtctgaaaacacttcttgaatatattttgttctctttgtagattgtgttttcagtgggtcagggtgtatcccataggagtttctccttcatgggtagaagcaaaagttgagattaagtcttttgcccaattacaaatagatgttagcagaactgggtctaaaatccaaatatgatagacttcatagcctgtgcccttcatcatgatcaagatcccattcttcccttttttggaccacattccagaaagaaggcaggtaagaacccagtcagtaaaaagcaaactggctattcttagtgctacaattccagtaagaaggattaggcagggagtttgctgttatagttggtgacttctcagaggtgccctgccaaagttagcttttatttattttcttccttgtgagtgaatggagaaattatggggcagttcttcatttatttgtttgctggttcattaactctatcatttattcctccatttaagattattaatggaaaacctactgtgtaccaggcactaggtttttgttgttgttttgggagggaaatgtagctcccagtgggttttcctttgctttcttcctcttcattcttttactctctcccaaactttcaatatgatcatgtgggaaaggcccagatggtgacattttagggatgtctccctggaccctagtggagtttctgggtggttaggagagaagttagggtctcctttcaaattaaaataaatgccaacatccctgggaggtatcatacattaagccattgtcagctaaggcttggccagctattaatgtttcaggagagacttattaagtgttaattaagagtaatcatggagaacaacataggccccttgggaaatgggacaggatgagaaagcaaaggaattctcacaggaaatgtggcaaggataaactctgaaattttgtctcaagctgagacatatatgtcccttgtcttctttggtctgagtgtcataataataacaaagttgagtgatgctttgtaggttacaggtcccccctgcccactcatttgtttttcttgaagccacctctcaatagcccttggaggtaaacattagtactgttgatgaaatggaaattggaagaaggaaattcactggctcaagttgcccagctgataagtgctatggtctgaatttgaacccaggccatctaactccagagcttctggtcctaattctgctctgccatctaagcttgcaaagctgcttgctatgaccaaatcatctctgtcttcattactggttctatcagttcagcattttcctgtgcaactccttcacagagcaccaagtttggtgtccaaggtgatttgggctttttgcatgcatccagataactgttgccaacctcaggaactatttcttcctctttgtggctggttgattggaatgggagcaaaaaagcaagtctggccagctacttcgtggaagaccaagaaatgacaaaggacacaaggatgttcttctttaaagctctgtacaacatgcagccaactaaatgggagtgaaagtgcttttgaggagaaataggaattaaacaatagtctatcgtcaggtttactgctgctggtaaacagaattcaaacatatttgcggggtaagactctaaggctatttttaagagaggcactagcagacattcaacgaagtctagatgggttaatgaaataaatgcatttcctgcttctccatgatttatatttctaaggctgcactacatagtaattcaataaagctgaaacggcaggaatgtctggcagattttttggaatatgatacttggctcattatggtggttcaatttcagtatctggataagggtcagatacaaagggacatcaagaacaatctttttttctctctctctctttcagcctctaccacttcagcatagcctgctccatctcaaccttattcatgtcagtataataggttattattaaaggcttcctgaagcttatggtctatttgagaacgatgaggtattcaccgcctgccaatcatgctcttcacaattaggaagtttatgcctcagttaatggtttttcttttcctcatgatgtaacaagagaatttatcctgtgagtaatactggaattcatccttatggccattttcctctgttagtgccccagggactatttgaaaccacttctttgtgtgtgtatgtgaatatatatgtgaaacagagagactcgggggagagggagaaagagatgggagtgagagggcagagagaggagaaagtattaatctcacagaactcttagtttccattctgatagcatttattgactatatagtctgtgcccctaatggtcctatagtggaaatctatatggtcctatatggaaatctgctttgtgtcagttctgtatcacttcttttgggattctgtttctcccaaggtaatgtgattcagtgggacctcacctggctgtaattacctttcacactacagggacaaggtcttcactcactctgactagttcaattttttttttcttctagacctaataattggttcagtgttcattctaaagcccaaacacgaccaatcaatgccatttgggtgatcaagtatggatgttgacggggagggatttgtgatgattgttgtcatcatcttctctttctttcttttttttttttctggaatcaccatgaggatgatgtaaacctagagatactactggtagccatttttatcaccaagtgataacagagatggcctgagaatgaagccaagaaagagcaccacagaactaagagagtaagtgaaatgcgtattgtagcatcatttgatcttctgagccaggttgcccccaaagcaaacactaacctgagacttcacagtgatgagagttattctccttttttgggctgaattagtttgatttgggttcttgtcacttgcaacagaagaacagcttctggatacctgaacatgtggaagttcctggagggtggtgcacccaggaacttgcacatgttccaagcaagagaaagcatggaaactctgcaccccttcccctcattcctcaccctagtatctcttcatctgtatcctttgcaatatcctttataataaaccagtcaacttaagttatttccctgagttctggctgccttaacaaattaattaaacccaaaacaggggtcgtgggaaccccaacttgaagccacttggtcagaacttctagaagtccagacttgtgactggtgtcttggtgcaggagagaaagggagtcttggggactgaccctatctccaggtagatagtgttggaattgaattggaggatgcccaactggtgtctgctgcttggtgtgtggggacgaatctccacatctttgttacaaaagtcttctgtgttgatgattgttgtggtggtgtgaaagcagaagaaaagcaaagtttgagagagtttttccctacacagatagtaatgacagtgtgaggaagggagcagttgctggactctagaaggagagagctatcaagagggcttccttgacaggagctgtcaccagggaaagcagccagccagaggtgaacttgcagggagggagcctgggaaatgactgctgaacctctgctgaagtcagagggtggatatcccttcctgtagttgacacaggtcagcttccaaggctcagagcaggtggagaatgcacctgaaggggcatgatagggtttggctgtatctccacccaaatctcatcttgaattgtagctcccatagttctcacatgtctgggaggaacttggtggaaggtaattgaataatggggacaggttttccccatgatgttctggtgatagtgaataagtctcacgagagctgagctgatggttttataaaggggagttcccctgcatacgctctcttcttgcctgccaccatgtgagatgagaccttactcctccttgccttctgccatgattgtgagacctctccggccatatggaactgtgagtcaattaaacctccttcctttataaattaaacagtcatgggtatgtccttattagcagcatgagaacagactaatacagggcaaataagagatcctcagtggaggtgcatgctgtcactgtccctatattatagatgaggaaatcagggctcagtgaggccatggtgataacgggccaaagattgtatcaatcagtagcaaagacagatggcaactcagttccccgaccataaagctgtgctcagcgtagtcatcctggccctgggggttttggctggacctgtttgcctctgaaaacagacccacaggcctgtgtgccaggctggaggatggggacagacatcgattgggcttctccttcttgccaggcactgtgctaggcatttaacccacaacaggcctattgagataggtgttgctgattccattctatatgtgaacaatcagcctcagagacgctaagtaacttgctcaagggtacacagctgatgaagatactgacctaggttccagaggtcagattccagaatccttggtctttccattatatcctggggcagagacctaaggagcagaaaggggaaaggagagggagagagggagaggctgctgtgcgagtcatttcgagatggtgggcaggaacgggggagaattcaggtggcagcatctttcttgggcccaggaagcataaggcatgtaggcaggaatcccagggtgccatctggagttccagaacatccctaagcagcctttatatctgcaggcctgtgctgggccgcagactcacatgaaagcataaaagccttctgcagcagatgggaatttgaaatcacgtgttgtgagcagccagagccgggagctgtgactcctgtgcggcgctgtcagtatgtctgagacactgcttctcgtccttcctcccctgcctgtcctttccactctgagtttctcctccctctctctcctttgctttcactattaaaattttattttatatattttttattttattttagcttgagttttctcaagtttcctctgcctcctccctggacatggagacacatcttcactttgttcttcaggcctctcaaattcaacgtgttcaagtaaaaatccctttcttctcacttagcaaatctgcctctcctcgttgttggttttgcattttgccttctggcacgggatgcctggatggaaggctgggaagagccagctttgcttcctgcctcccctctcctttccctccctccatctctagttggtttcctcatcactctcggtgccccttctgctttctctgcctggtttccgctctcttcatctttcactgaagctctttagatatttttggagccgagtccctgactgcttggtctcttctctgcttcctccagcacattgccacagatatcacttgaaaacattgtccaggtgataccaacagttttagcaagaagagaaaatggaggcattttccaggtgactttgggaaggagagtgtagtgggcaggctcacagcccccacaagactccagccctaattctgggggcattgcatgttagttacttccatggcaaaagggactttgcagaggaaatctaggttagcaatgagttgacttaagatagggacattatcctggattagccaggtaggctcagtgtaatcacacaagcccttaattgcagaaggggaatgcagaagggaaagtcagagagattttaagaatgggaaggattcaaagctctgttgctggcttgaagatggagggggtcccaggtcaaggaaatgggaacctcagtcctacagctggaaggagctgaattctttcagcaacccgagtgagcttggaaggggcttcagcctagagcctctagaagagaatgcagctctgcaggcaccttttcagccttgttagatcctgagcagagttcagccatgccatgccagacatctgagctacagaaccctgatataatgaatggtttttgtttgtaagcccctaaatttgtggtactttgttatggcagccccaatacaaactaatacaaatagaaaactaacacacacaaaaaagccagaaagataaatcagaaaccaataataatgattatgtttatggttatgagggaacagaaataggaaggagacatcactgacacacagggaaattagcatacactgaacatttgctgcggaccagacaccatgccaagtcctttgactgctataccagaccgggatctgagttgtaaggaatagaaagggtctttggctaatctaagccagaaagaaaatttatgaaagaatataaggcatctcccagaaactccaagaaggctggaaaacaaggcttgggaaatagttgggaatatagaggaagcaaggtggccagaactcagccaaaattggaccatagagccagggtgttgggtggaccacagctaccctggctgtcccctggcattgtggcggctttgctaccacagccagctctggcctttggccattgggcattgctagcggtaccactgctctagaaaatgggatggttctggtgaatacagtattgcctaaatggatcctgccttgtccctgcgtctgtggatcattactttgagatttaaaactctgagcaggtgtgtctggctgggtcacaggcccagaaggttcaactgctgtgcagccaaaaaatgactcacagaaaatggcaaatcatcctgtaccatctcatttaatccacataacaacccagcagggaactactattatccccacttaatagataaggaaaccaaggctgccaggaaggtgaagctcctttcccaagatcctgagcttgtacagggcagagctcaaacttgaactcaggtcacctactttatatgcacatcctgtggcctcttcttgcagtgacagtcaagtttcagatcctttctgaggaaagaagaggcaggtggattctatctggtgcgtggttcagagaactctggggagacaggttgaatgggagcagtagctggccaaacagctctgacccgtttgcttttgaggcttgggcatggcagaactttaattatttttccctatttagtgaaatatgctttcagacatctgttctgagttggtccccttttgttagtatatattgtgtagcatggcctactctctctcaacttgaaatttagacaagggatgttgaggctctgctgatgagaccaccactggggaacctcatcttctgtcttgcctctccttgccccctttactgtccttctccaccaagcattgcaaaggaaatgagatggaatcccacccacctgggactctgcctgggtacaatggacgctaatcatagagaccagtctgtgggttaggggctccacccagtgcactcagtactctgagccctatctggcatccttaacacagctctcttctcctgccccattatcctcccagctctgagccaggccagtgacagaaagaacaaaaagaaggcctcgtttgtgatctatttcctgatttgagatatctggagcaggtccagtcataggccactgattaaaagtggtttagttactgtcactggtgtgaggaccaggctaaatggaaacaagccaagctcaggctccacagagaggaaaccccaattcaaaagttccctgggatgacctccaataaaaaccatctgtgaaggtgacttatgagcactgacaagaattggttcatttaggcgttatttatgataaatatgcaatatatacgtatactcaatatagatatacattcaatattcaaatatagaaaataaatattcgatacataaatattcactagttttgcacacatgtaggcctatgcagtagagtttaggaattaagcatgtgaactcttgatcacctactctgtgctaggcatctgacacacatgatctcacttagtgttcacatcactctccgaggaggatatcgttgtgaatatcactgatattttacaggtagcaaaatggaaaataatagcagagataatgtaagggaagttgttttcatacattataaagtacagtgggatggttgactacaattactgctaattatgattaatcatcattattagttttaataattactgaaatagagagggttgatgttaacccatgttactaggccacagccaaccagggtgtcagtcaggagggactgaaagttgaaggacagggtcattcctgtccaagtgagaacaaaactcactccctgtatctatttaggcacactcagtcctaggtattttgctcatataactcatctgatcctacagctgccataagagatagagacaattattcttcttttacaatggaagaagttgacatggagaaaaagagtaggcagttgttcaagctcatatagtcaatggagatttgcaccctggcagactccggagcctgctggctttatcactaagccagtgagctcattgctgtaccaccagccttagtcacatttcagcaagtgtgtaggattgctagacttcactcataaaagtatagaatgcctaattaaacttggatttacataagtgacaagtaatttttttagtataagagtctcccatgagacatgggcatgtgataatgcgtgtagagtctgttaaacaccaggcacataattggtgttcaaaaagcctcatttccttctcttatgtcagactgctaattcctacccaactccgatatctatgactcttcagtataaaatcctaatttccagccgggtacatcctttgattatgttcaccagcctcccttattgcttccttataactaggtgcagccaagtgactaagttattttaaatgaaatgcaatcacaagggtgacttagagttttagaaagtttagaaagcttttagaaagttagaaagtttccttaaaagggaggggacaaactcgtcttccttcttttggtctttcccatttctccctttatcttgtctgtaatgtaatgtacatggaatgactggcatctggccagtcatcttggaccgtaagttgaccttgaggatgaagccattgcatgaggtcagtgaagcagaaagacagatgcctgtatcccttcctaatgaccatggatccactatccttgccagggactgcctatctctagacatcttttgtgcatgacagaaacaggcttcttcttctgaagcctgatctctgttagtagcagtcaaatgtaattcataactgatatgcattatccagtaaatatttcatgtgtacctattataagccagacattgtaatggattgtggaagtaaaagaatgccattatgtagctcaaggtcttttcaaactttctttatttaaaatttagatcagagccaggagcaacctcagcaacttctcaaatcaattcattcattttatatatttaatatctctactgctttttgcctcagaaaattttgtaagtcatttttctcagctcatagcacatagtcatcattagtccctgtgaaggctctctctcattttgttttttcccttttttctgacttctatgtcctactctccctacaataagtactaaccctaaagtgtatacatatacatatatgtgtgtgcgtgtatatatatatatatatatatatacacgcacacacatataaacaattaatgaggttgtgttcttgtaaaatattaccagtctatgagtctgtaattttcacaaatgataatatgctctaaacctaattctttttaatttttttcacttaatactatttttctaatacgaatatattactaacaataaaactactgaatgaagtttaagatttctctgcaaaaatttttgttgtgttggtttgtagagtatatcccactaaggatgaatagttagtatattgtgttcaaacatttgtttttgattttggagttagtcttttctcccctctttttggtttaatttattttaaataaattaaataaacataaataaacctagttcaaaagacaaatctaaattaaaaattctatgcagagatggcttcttcccatccctacccctccttcctatttccttcccctcataaccagaaacataatcattattactggattctggtttatgtttctggctttttttggatcaaaagtaaacacacacatattctcatttctctttcttatttcatgaaatgtagtgcacatataaacactgttctatacctgggcatatatatgctggagttattccaaacatatatgctggaattattaccaagaatatatgctgaaattattccaaatcagtaaatagaaattttaaaaatcctttttacatttgcatagtactccattgtgacaatgtacaatagtttcttcaactaatttcctcttgtttgaaatttaggttgcttccattcttttattacagacaataccactgtggataaccctggatgcatgttgtatttgtgcagatgcatttccagggtggattcctggtaatggacttgcagggtcaaagcacaaatgctacctcactttatgaaattaatatggttttgctgggtcctcatccaaactcatcttgaatcttaatccctgtaatccctgtgtgtcgtgggaggggcatggtgggagggaactgaatcatggggatgtttcccctatgctgttctcatgatagtgagtgagttctcacaagatctga

SEQ ID NO: 5685 - DNA, 902503 bp, Homo sapiens
  NPAS3 gene - 32478200 - 33340702 of chr14; NCBI Entrez Gene ID: 64067; Build 35; sequence includes 20,000 bases upstream of initiation codon and 20,000 bases downstream of termination codon of the gene
aggggcctgtcacatgggtaaagtttttacgggcccagcagtcagagacatgctgagacgttccctctaaagtaaaaaacaaataaacatacaaaaaacaaattgtggcatcttgtataccctacaggaaagaaaggagcacagtgtctggtaagctgctttgggttctgtagacaacacattccgtacctagaaatactccctcagctgaaatatcaggcgacgggtatcagatgcacacttcatgtccaagcagccccgctgctcagaccacatgatcaggcagaccctatgattttgtttagtgatgggaaaggatacattggcttttagggaaaagcccagttggagaatctcaatgcagatccctgggattttgaaacaaatccaagtcatctgcaaaagagaaatacacactttttcaaaaaccatcaaaaccaatagagatgataagggagaaggaggagaatggagtggagaagggaagtgaatatcagttgcaagaaggactgccttcggaagaacaacccttgggaagcctgcagggctgccccctgaatatttatggagaagtagatccaaatggcacaggaatggcctgtggccgccagggaggtgtgctagatgccatctctccttaagaaagaacctgctactcagctgtgaggagtacagagggttgacagctttctgaagcagtatctttggagtatgttacaacttttgaaccaaggccacactcttccctgatggtcctcaaacaatgactgtacatgatgagggtgccagggccagccacttctgccaggcgtgggggagttcctttaatatgctatgtaactccctacttttccagcgtctgagtctctttgctcaattctgtatcctccccacttgcctttcataaatctcagctctatgtctggtctaaaaagccttctccccaaatcctcttgcactcctgactcctgaacagactggggtgataagttaacctccaggagccctttctttactatttttcacatttgtaagaaaataaaatgtaatcatttttgctgtcttccagttacatcatgcaacaggtctctttcaggacagtttctaattacatggtgagaagggcgtccactccatggaagggcaagtattcatgtgagaattatggcctcttttaatggtaagcatagttttgcatccttaactcctgtttcctacatcattctggagttaaagtctcaaaatattacttgaattatttgttagtctcttcctctgtctcaacagtacctttgtaagaactttaaagtcattttctttcactggtatttaacgaatgctgattttaagggggatctagtttcttttttttctcatcctcttattttttcttccgctggtattagtcttttccgttgcttttattaagctatctttgagttcagaaggctgagagattattttcttttttaaagaaagcttgcctaccagccagttttatatttttccccaagaactcaacagtctaatctttttcccatttaaaatgagaatgagtttagcaagaaattgacttgatgttaggacaggagctccgggaagctctaatctcagtgacagccttaacaaaccaatcccgctctctggcctcgtacatattgaacaggacctgttctttctggccctccaggtaggaaagtaagcctctaaagtaaactggcgagggctctctattcactcttttggtttgttcttctgtactttcaggatcttgggtctttgcaatatattccctacccttttagaagcagaagaatgtaaaacaggaagtggactttggttgcttttgaaatgtttgctctagttttactattagggcagctctcaaaccagtgacatttagaaatttcttgaaattcgagtctttaaagaaatattttgtttttgttttctctttccacaggaaaaaaactaatgacgtacattttgtgggctagggagagggagtcttgcctcagagaaaatagtattataatgatctgtaacattgcttattggttgtatcagtaagtatccatgccagtgaccctcagactttggagtacatcataatcacctggagaacatcttaaaatacagatttctgaccccactctcagcatgttttattcaataggggaaggccgaggatttgcatttctaacgagttcccaggtgatgataatgctggtcctgggaccactctttgagaaccactgatctatgccattgctgtcagaacccagtaggagaaaaaaaaaaaaagctcaaatttctacgagcattgttcattgaactagggggttatgactgttttatatcataactgaattaacttaatagggaaagttataaactctgattttagaataaataattattgagataaaatcatcatttatcttctcagtctggtgggtgacattgcgctcctttgtttcttacaaaaatgtatatgtggtcaattatttgtaaaacaaaaactggaaactaaaaagtataagctatgttgaacactcttcggttgtctcaaatacttattggaatcaatagtagattatgaagtttttttctgtgaaagtaaggattaataagatgcactttataggattgttacgaaggttaaaacaaaaagtatatacagaatgcctaatagtgtctgacagtatcagataatcaagaaaattaatgttttattttcattcctttaaccatttcaacaccattaattctttttttttttttttaacacagagtctcactctgttgcccagactggagtgcagtggcctgggcttggctcactgcaacctccgccttctgggttcaagccatcctcttgcctccgcctcccgggtagctggaattataggcacgtaccaccatgcctagctaattttgtgttttattttattttatttatttattttcttgagacagagtttcgttcttgttgcccaggctggagtgcaatggcaacatctcggctcactgcaacctctgcctcccagttcaagcgattctcctgcctcagcctcctgactagctgggactgcaggcacatgcaaccatgcccagttaatttttgcatttttagtagagatggggtttcaccatgttggccaggctggtcttgaactcctgacctcaggtgatccacccacctcggcctcccaaagtgctgggattacaggtgtgagctactgtgcctggccccattaaattctttatgatgatatttttaaaaaatatatttggtactgaaaagtgagagaaataggagaggggaagttacaaattttattaaatgttagattatgtttcattatacattgcaataattggaattggggatttttttaaaaattttattttttacaaaaaaaattagataatagaaacaaagccttcaatacagactaggcatgctagtttagactactattaaaaattcaattttttttattgactctatagccaaatccatgtaatactaccaataataacttttccatggaagtacgtttgcatgtcagagactgtgctaaacacttcatattgcttaccttgtttcatctttataataaccctgtgaggtatcttttctgacttttacacatacttgttcattggtatctcctcttacctctagtgaaagctttgatgacgaacaggggcttcgttttataccctactgtagccctgctgcttaaaagaatacttggcggccaggtgcggtggctcaagcctgtaatcccaacactttgggaggcggaggcgggcggatcacgaggtcaagagatcgagacgaccatcctggccaacatggtgaaaccccgtctctactaaaaatacaaagattagccaggcatggtggtgtgcacctgtaatcccagctactctgaagactgaggcaggagaaccacctgaaccagggaggctgaggttgcagtgagctgagatcgcaccactgcactccagcctgggcaatagagcgagactccatcccgaaacaaaacaaaacaaaacaaaacaaaacaacgacaacaaaaaacttggcatatggtaggtgcttaaggagagtttgtcaaaataaattcatgcatcaatgaaaggaagtatggaagttaagcaatttgccgcaagaccctggccaatattaaaatccaggaactctcactcaagttttccccgtcctgacccttcacatgccctgcagaagatgaacttttctcaactatttaaaaaatatctgaggcatttgtattactttctttgcagctttcaaatgctaagaatagtgtatgtaatatcaaaatgttctttgaaagaaacctgtagtttaggtaaaagttcaaaataaactcagggtgaaggtaagagcatcttttatagagaagactggaggaaacaagttactctgaggcctgtctttgtgtaaaacggtactgaagatggcatgacatctggtatcaccaacagggggttctctctttcccaaactgttaaatgcctgcagtctctccttcaatgaagggtgtggttgatttctctaaatcccacagagtataaacatggtgatggaataaacttgatccttgttatccctccctcatattatgaatataggctaaaggaacaatagatgaccacagtattattgatgtgcacatttccctgaatttaagttctaaatcataaattaaatgaaaatcatacctcataatacaaagtttctttttatactagaattcttagaaatttgtcatcttcttccttttaacaaaaggaaaaatgtcaccacattttactcctatctcttcccctttggctgcattgaaaatcagaaacatctttatctgcttcactggtgaatactttcaaatttggttatttcaaataaacactgttgaacttaatcctcataagctttagtgaagagttacttctaatattttcatttcatataaagtggatttctatttgtctcttaattttaagtggatttttgaattgaactgtctcattctacaataatagaactcttgatttttatctggccacatcactctgtatacggacttcatttcctagcttattccagccatttgtggccatgtgactagattttgcccaatgagatgagagagcagtacatgtcatgcccgaaacgtgttctgaagggcagtgtacatgcccttctctccctccctcctggtacttctgtcctgcaatatggatgtggtagctgatcgtcttggactgtgtggattagccgaacacccctgacatggtggaacaacaagagaaaagaaacctgggctcctgaaccatctacttttaaatgctaacatgagagaggaacaaacttctgtcttatataagcaactattaatttgggtttgtgttacacaaagctaaggtagcttcatctacagtatattttccttctatattgtttaatatatctttttagaaaaaagtaaaaaaataaggaaatcataataagccaagatctttagcaacaatgaaatctccaagtgaagatactttatatcacttttcaagatcaaacaaaataagattgctgggcatggtggctcatgcctgtaatcccagcactttgggaggctgaggcgggtggatcacctgaggttaggagttcaataacagcctggccaacatggtgaaactctgcctctactaaaaatacaaaaattagctggccgtttttgcatgtgcctgcaatcccggctacttgggaggctgaggcgagaaaatcgcttgaacctgggattggcggttgcagtgagccaagatcacgatactgcactgtggcctgggtgacagagcgagactcccatctcaaaaaaaaaaaaaaaaaattgacaaaactttggtttcgatgttttccctcggatatagtaagttgtaattctcagtgaatcctcttcaagtttatagtttttgttggccataaccacacaagtaactttgtaggagggatcattcagtcaaaataaatagaattaaaagttttgttagtgtattagctttgtgcaaaggtacacagataaaatttctatacatatcctttcttgatccttccaggcacagagactgaaaagctgtctgtataaataaacaaaaaagcatattcttctagaactttccattatgtatatgtctgacagggtataattttggggcaagattatattcatttctatgttagctgattaattcttcagttgtttatcacctgtttgaaatatatccttgatttgattatgagtcactgataatagatagtgacctaacttcaaaaggttgtcttaccctatttggtctgtaccctgagcagctgtccagggtacttaaataaaattaattattggaatacttaagttacagatctttttccttatacttttgagtaagtgaagatgctttgcacaataattcagtttgtttttccattttgaacaagaacctgagatcctcctgccttagaatagtgataaacataaagaaattatttgtggttgcctgtggaaaccatgttagaaagatcacacgctttgaaaacagtgttatgatgtgttgtttatgatatagagatgatttggttaaagattatgtctatataagttataaatttagaggaaatggaccccctctgaccctcagtgcaaaaatttctcttctaaatacctagaaggtagtcttcttgtctgctaaaatatgtgccaggtaagggatgctcagctctttcagaggtggccctattcacattctgaatgatggaaaacttctttccgatatgtaacttaatctagatccttatatatttcatctttccagccttctggaatatcattctcacttatgcattctcatacctttctcagagaatagagaaaaaatgaagttcctgacctgagatcttcaacattaagtaattgagttcctttgatcaaaacagtacccacttcctggatgataataatagtataaaggaacaaagtacctatttcaggttctagataaaattgaaattaaagaaaatgtggtatatatacacaatggagtgctattcatccatagaaaggaatgagagcctgtcatttgcaataacatggatggaacttgaggccattatgttaagtgaaataagtcaggcacagaaagacaaagttggcatattctcatttatttgtgggagctgaaaaaattaaaacaattgaactcatggagatagggagtagaatgatgcttaccaaaggctgggaagggcagtggggtaagggggaagtgggaatggttagtgagtacaaatatacagttagatagaatgaataagacctagtttttgatagtacaacagagtgattatagtcaacaataatttattggacatttaaaaataactaaaagactatgactggattgtttgtaacacaaagaaagaataaatgcttgaggtgatggataccccatttaccctgatgtgattattatgcattgtatgcctgtatcaaaatatctcacgtaacccataaatagatacaccgactatacccgcagaaataaaaactaggagaggaaaagaaattctaagtacaacattgataataacccattcataattatttgatagtaatgtaatatagaattgtaaagtacattttcactcttttaaaaattacagcaaagagaattttaattttttaatttattagtaataacaacttgagaattgcatagtattaaggcatcatttcttggagtgtgggctgaggacccttttggggtgcctatgaggacaaaactattttacagtaaaactaagacattattttcccttttcaccatagacaaaaatttagccagctgtggtggtgtatgcctgtagtcccagctaatcaggaggctgagatgagaggattgcttgagcccaggagttccaggctatggtgagctatgattttgccactgcagtccagcctgggtggcagagtgagaccctgtctcgaaaaaaaatcacgcatgaacaaaaaaatctataggtcaatggattttaatggctacggttatgaatatcttattactattatttcagatcccacattatgactaacttttaagaaactactacttgttgagttttggtgtaatagcaaagaatacccataattatatgaaaaagcaatgatatttgaacttaactcttttctaactccatatacgtgtgaggctggattttcttcatgcacaatcaaaacaacatagcattataagagatttaatacagaagagatatctgtcttctactaagacagatattaaagagaaccaataatataaaacagtatcacagttctattttttgtttggggataaaataattaattttttataaaaaagttatgctgtgtaatgagtttatcattgttattttaaaatgaaataataagtttataggttttaaatttgaacacagtaaatattcatagatgtgatatatataatccaaatctctttcagtggctcaaaaatattaaaggggacttgagacaaaaatgtttgtgaatcattgcactatgtaatactttagtgaaagatttcaattatccttaccctcattgattcaaaaagatttggaataaaatccaaatattcttatttccaataataaccaatatagaatctgatatccaaattgtatttacactttgtgaagctattttattttatgcctctacacttcttgtatatgattgatgccagaagattactaacctttatgtaaagcaaaacttcaagcctctagaaaagtgctcctgacttcatggaacacttgcaagacttttacatggcatccttcttgactttgatgaaaaagttagtcactcataatttcagttatattgttgtaagtttagaagaaataactgtttatacttgtcaaccttcataaagagaacacgtaaatattttataacttgtctgagtaatcaccaagaacttttccatcaccacgaaaaaaaacttggaagagaacttagacattggtcttctgggaatgattaccttacattgagtaattaacatgtgttaggcactgtactaagtactttacatatactttatatcaattaatgcctacaataatcctttaagatctatattattagtttctttctttctttttcttttcttttttttttttttttttttgagatggagcctcactctgttacccagcctagagtgcagtggtgtggtcttggctcactgcgacctccgcctccccggttcaagggattctcctgcctcagtctcctgactagcgggattacaggcacctgccaccacacccagctaatttttttagtaaagatggggtttcaccatgttggcgaggctggtctcgaactcctgacctcaggtgatccacgcgcctcagcttcccaaagtgctgggattacaggcatgagccaccgtgcccggcctatactagttttacaaataaaggaactgaggcttggagaaagtaaacaaattggttgaagtcacttagcttgtaaatggtagaatcaccttcaactcagagaacataattcacaccctgtgtcttgaccatgtttgattactcttctcatctggcttggctcccaatccccatgccagttttgtgcattttacataaatctattgttgcccttatgatattttgttgcaatttatttgtttactatctacctcttctaataaactattgactcactaaaggaggaaagtgtgtctggattcccaccacacaggacacatctattcttgctggatcgaattaataccaggttgcggacgcaaagagagcttaaataatatgcctttgactgctcagtcagtgtgtgtagcaaagttgggatcttctgtcataaacactctaggtcagtggttctcaaatgtgcgcctgggccaactgcatcagcgtcacctaggaacttgttagaaatgcaaattattggtctcactccagatttacagaataagattttgtagaggtaagccccagaagcttgtgtttaaaaaaacccgtcttgtaattctgatgcaccctaaagtctgagaatcatctctctagggtgaaggaacataacagtttaataaaaacagaaaggtttactcagcatgcagcttaataaatccatttgtttgatctgctgtattattaggcttatgcaatattctattttattgaaaatgaaaaattcatctcagaactctaatgtttttattttgaaaaaaattcaatccaaagcaattagctatcccgttagtcaatcaggcattgaattaataattttataatcaataagaaaattcagtgaagagtccaatggctacatgggtatgcctactaggaagaaccaagtgaagtagaaactcaagttccagttagcactgtgtataatttccagtgaaacaaaaactagccatgatccgcagatctgtgctgcaggtaccaagttatgtcttagtagttccatcgaagttctaattacgctgacagtaatagaagcagcaaactactagaaccaacatttaggacccttatattcacaggaaaacaccaaatcagttctctagaaattagaaatatttcaatctcaacatcaaatccactatcatgagaaaataagcaaaagaaacttaaaagattgttgtttaaagacaaatttgtcttttaaatatgttaagagtagttattttgcctttaaatcaaagttcatttatagttatattgatttgcacatgctttagaattatgtgtgccacaacgtgtaaatattttaactaaaatcctcatatggatttctgaaacccttccccactaatttttctaaacaatgtctcctcccctactgcctgctactgagtttaaaagctaaaagactcttctaactatacctcttctttttctagctatatatttataaagtcctctgagaattagtttagcataatagcttgagatatttcagtttgatatatgtagtactaatatgaaaaaatcctcagaactctttttatatattatatatggatgtacatatataataaaaatttattagccattatctcttaattcctcagtttctcttctggaataccaagaatgattatattgctaagtttatggttgttttcctcccctgacattattgttttgtttttgaatgtactaaggacatattaatagcatggcaaatttagcagtaagagctagaattccatttggattgaggagcaaagatggaaaattggttaaattaaagatttaagccctctacagaatgtaaaaatcttcttcccaagatacgatggaggtactgtgtaatactagttcatggcttctcccgtaataaagactcaactctcaggttgttggaaattatgagagtttctttatagaaaaaaaacaaaaacaaaaaaccctttttgcagcataatcacttcagtaaaaacatctaacatttcagagaaaagcattttttactttatcattacctatagtatttttattctacttatgttgttttgctttaccttttcctgatctctgtatgtatttttttcttcttaaatatctgaccaaattgaagcaaaaattagatatattcaggttttgtagccttctctctcctacctgtcattggcaccttctgacagaaaatagtgaaaattcaaagtcaaacaatttaagtacatggaaatgaatttttcagagactagatattagtattgtatgagtaaaaggcacagttgtacactgacaaggataaagatataaatatgtaactgtgtatctatatatcatatgcatgtatttggggttaaaacatcaaataatccttttccaagtctctacacgcactgaaatttatatgttgcaggggtataaaatgagagagtatacagtttagtgctaactggagtccttttggttgggtgaatgccaaagcaactttcaaaatatttcaaaacagctgccagcatgtaaagattttaactgaaggagcagagtaatgaaatctgaattactaatgagagaataaacttatattttgcttaaggtccttaatgaacatggagataagcagatccaataaggaattcgtctctcatgcatgcaaaccgaccttctgaaactacacatgtaaggataaaatactgaaacagacttaacattgcgttgtaaggtaacctactatgcaaatcttctttgagtattttgtgtattcctgttttagaaaacaaagtttctggagggcaggagccatattaattctcgtaaagatgggtaattgaaagcttggaactttgaagttgaatgtgctcattaaactattttaataacaaagtataattgaaaaggcttcagcttatgtagttttaaatgtccaacaacaaatctcacattttctttccattggggcaattttgccctttgggcttccaagaaaaaattgccctccaaaagtgatgggaatcaggctgatacattttcaagccaacgattttgtaaaataagtagtgaataaaatgtaattgctggcctcttctagtcatagaattggtattgaaacaaagaagagcaataatattctttgtaaatataactcattgttgactgtgcagaaagactttaaaagggaaactaatcttctaaaagttctgcacttttggccacagacggcttttccctcctttgactcacttggcacattgaggctgcctctggatgcacaggatcaaggtggagtattgcattacattcctggagtacacatggatccaggagccacttgctggaagcctccatcaactggttggcctagacttctgtggcaggcacagcaccaccccacagtggggcaacaattaaaacaaaagctattttatagaaaggcaccgcctgcattggggttcatttttagcctcattcatgagtcatttacatactagacttcctttggcctacaataccgccggccttgaccaatgcagtcagagaaagaaacttttcccaacccctaaaacattcctgacctctctcgaattgacataaactcccatttctcgccctgagaaagcctgcggagagccaaggagtgatatttgtgatcttttcagagcaagagaggtagggaggagagcgcgctgagatccaagtcaacctgcgacgcccagcgctgtgtgctccgcgtgggatgaggacccacttctgtgatcaaatctttcccaccagcctggccttcgcccccacgcccacaatcccggcccaaagaccttgcgtttggcctctgcacaataagtatctccgaaatgaatgccgttaagctagaaaatgatctcttctcgggaaggagggagtcaggacctcggttaggtcttcaacaaactcgtgggatccctcacacaaggcacagatgctcattacgattctttttacgtgcaacacgtgggggacgaagcagtttcatatctcctggtattatctgccgtccaaagcattttctttgaaaggaaaatggaaacgcagctgcgccgtgggcccggccagcgagagctggggctccctccctctgtttcccagcggctgccgggtgcaggaggcgcctccggaaactgacttgggttaggggagttcagaggttgccccagcaggcgcgggacgccgccagggcgaaggctcgtctttgtgcgggttggctgtttcccgagagccatcagggtgggaggggacgcccgggtctgcggcaagggcaggcgtctggcccctacaccgtgtgcggggacgctaggctgggcggcctgtgtcactcttggccttggcaacttctggccaatccgccctgcccctctgggtcccggcgggccggctgcgccctaggctcaaagggttaagcaggtgcctctccgggcgaggcgctattggccgagggctggggcggcgcggccgcggtcaccacgcttcgccgatcccaacttgggttcctgcggaaggcaaggcggccactcgtcccctggctgcggctgcggggcccaggccttggcgcgcagggagtgggaaggagaaaaggacgagaaggggcaagcaccagccgcaccagcaaagggggcgagggtggcgcgcgcaagatgaggggagctgaagccctgcatcccgaaggaggctgcgcccaccgcccgcaactccactccaggctcgccagccggaagaaagaggaggaagtgggacaacgggggtcctgggcaggggtaggggaaacgatcaactcccactgcccccacccactagtcgagttggaatgcaagtcgtcacttaaaaaggctcacccaaaccgcaggcatacctcctcaccccttaaagaaacattgatgtaatagtgtggagaagtaactgagagacgcgaggaaataaatgcacgtgttttctctttttgtttccctggtggttggaatttgcagagttcgtctcagtggtggctgctaatttattcgtttcatcggtcgaaaggggcgtatagaggtgggtcagcggggcacaaccggatccctctaaccggacctcacctcacaagtttgtcctggaccaacccgcccgcccaccagcagagggaagggcccattcttataaggagaacaaactctccattgcacaaaagcggcttctttttttctctccgtctttgcacaccatccctcctcgataagtatcaagttctcgaggagcccaacttgcgcttggcagccctcgcgctgcctgatgtgcataagacgggcagagaggggttccggccaggaagggaggctctacgtccccattcctgcacacgcgggctggcttccaggttgctggaagccgcgggaggcgcgagcttgcctggatggtggttatttctctagagaaaggaggagagagagagcgcgcctgagtcttgcactttgggtcggaagtgcgcggcgtgtgtgtgtgtgtgtgtgtgtgtgtgtgtagaggggggcgggaaagaaacgcaccctccgctgccggtcattcccttgcaccggccaagtcctcgccaagcctcccggtgcatccttcctccgccaccccctccccttcttccctcagctgggctcgcgcggcgcagccggagcagccagtgagagcaacatcctggaaagaggggggagcaccgccgccccccaaaagggaaaaaaggccccaccctgacacgttttgctgtttgcaagtccctcgcacgccccccgcacctcctcctcgcgcttgcggccccccccacccccagcccgctgcgcgcacatcaaagctcctctccgccgcgcacagtggccgcggctcactaatgggattgcaggctggtgcctggctccgctgctgccgccgccgctgctcgcgctgctgctgctgccgccgcccgagcccgagcccgagcccccgccagccagagcccagagccgccgcgcccgggggccgaagccgcggcgatgatccgaatctttccggatttcagcgtgcaggtgacggccgcggcggccggcggggcggccgcgggggtgccggccggcgcgggcatggggagggccggcgccgcggccaacggcaccccgcagaacgtccagggcatcacctcctaccagcagcggtgagtagtcccgcctgggctgggatagtgcccccgccccggggtgctggggtgggactcactttgcctcctgttttgtgtcttacaacacacatgcacattgccagggctcactttgcctgcccctcgttctacagatgaggaagaaaaacacacttcactttggtggattgaaaagcactccagtgcgctggcgaagtgaaatcatcctttgccctttgcctggccccaaatccagagcttcagccccgagtagcggaggagttgcagcgaagtctgagacgccgcacaaggtgcttttgcaaagtttaggatcctcatccctttccagtggaattttctcaatgcctcagccggatgcggacccgcgcatacggacagctaggggggcaattgatcactggaggctgattgatcatttgtttccaaacagaataggaacgattttcatgtgtagctgtaaacttgcaattctacataatagtgttatcatgtcacctgttactacagggaaatacagcatgaaatccgagtctcttcggcgctgttaagtattcatcttaaacgcattataatgcaaatgcataagattcagggatacaagttaggaagcaaattttacaaagtcaggctaggtggtgagaaggaagttttaaagtattatttgtagttctcttaaacgtatttatagatttttcttaaaaattacgtatttgacattgaaatagtaatttgattcaataaggaaagaaagggaaagcaatttaccactaccaacagctttagaaccctgaagtttttcctgaaggacaacttttgatgttccaagattttactgaaaatgtaatccacgaaaatgcgctgagaaaaactaacaatgtactatgaaaggtaaactccccatttgtggggcttggttttataaaagatggaagaaaaaagaacacatgaaagtgtgaaattaaatatttgtgtttcccagattgcacatgattaaacatctgagagatttgccaatggcatttaacttaaaatatacacaatgcataattcaaataacagttcctatttttaccttgtatttcaaacttcattgatttgagaacctttgatttgaaccaacagtatttaaactgaaaaggttaagataatctatcactgccatattttgtgccttccaagcaatggcccagtgaccagagcagattttgcataacacactgagtgttttccaagttgatgtccagtattccaaatattctgtagaagacttcattatatgctctgtgtactgtctgaagtttttttttttttttaaagagtttggaaaataactcaaaaaggggctattccttgtcaaagggatttttgatttaaattattttagtcttgttttacttcagtgattacaggaatctttaatacaaaagatctgggactctttcaaacatgaaagactagaaaagaattagatttttccttttcatggttcaggtatgtttttttggtcacttatacaacatttaaatgacaatagtatctggcggtcactttaactaggaagtgcaggcaatggtcacaatagtatggtctgtgaagtagggagtcaagggtcagaaatgtcagatggcctttggaagatttcagggacctccgggaacttgagctaacttataccatataaattgggcataaaagggtgggggattaggaattttctgccatcaggtttgctctgagtgttgttatcctttaccataaagatcacctcagagagaattttccctcaaggcaggagcaccaggggcagtcccctacagtctgccacctcagcactgagagctgcactggtgctttccactttcaactttgaatttgggcaccttatgaagtctctgaatcccactgcagttctaaagactaaggcttttttttttttttttctagcatctctaaactttagcctttggggtgtattattccctccttcgatttttatgttatattggcagaagagaagatgatagctgtgaaaaatgtagccttctttgattttgttactaagacatgatgacacctgttactgtcttttagtcaaaatagggggaggggggcagagagtgagccgtgtaggtcaaggtcattggcaggtgttggaggtagggtctgagtcaggagtcccctgtcctctggcacctcaacaggattgtggggttctgaaggacagacttagtttccgcttggatttgtttccatctggatttgtttgttaagtgaatggtgacatatcattttaccaaaaaattatttttaagtacttttgaggagtccgccgcgggagtgacaggagtggggggtttttcaagcaaagagtggcctcttgggagactacaagcttctctcatttgtcatcttcgggcagaaaccccctagactgggtgtcctggagccaaaactttgaactggcaactttttcccttctctgccagcccatgtatatcttgtccataacactctccactccagttcatttctcattctctcctacctgtagagtgtactccaaagagaacttaaacaccatcatgcagattaaacacctctaccacgaaaaacatttatgtgttcctttggaagtttccaactcccagccctactttactggagtcgtagagaccgaatggaggaccccttttcaggtctttatttttttcttaagcttaaagtcaaatgcagaacctcacacaggactgatgttttccatcaggcgctttcattcattcaaagtggaaatgctttgggagtcctttctacttgcctggttgacacatgactgacccaagtctctgcgtaaaaagctgtccacacgcttctgattggtttagtggagaaaacgctctgaccagggtctacccaggtaacaggattctagcccgggccctgcactgagtagccagcctttctctaggccttgctgaactgtcaaaccggggtgcggctgggctagatcccagagggtggcagtccggtcccaagtcccgggacccgagtcgggaggggcttctgtatgtgagtttaaacgcgcggggattcacctgtgaaccctggggtctgcactcctgtacgtccgtgactgatgcagatgctccggctttgggaacgctgctgagagcgccagagccacaaggtgcttgtgctgctgctgcaccgcccacggggctcttgggcccatctgcttgggccagcgcaccccccatccgtattgatttccgctgcccccaaggagctcccgggactgtgtcctgccccagctcgctcctgtggcctcccagttcctttttctgtttctttctttcctcctggctgcaatactccagagaagggaagtgtttgaaactgcaactgagtggcgttgttgcgccggcagccgagcctcccagtcccccaacgagaaagagagagagagagagagagagagaaattgagagagagagagagagagagagagagagagagagagaaggggggggaggtgtgtgtctgcgtacgagagagcgctctggagcaaagcagctggaaaatgcccagaaatactttcacagcggtcaagctggaaccccccgcgtgtcctcccccttcccgctcctcccggcctagaccccgcgccccccgcagggagggtgtgcgccccacctgccaccgggctgctccgggtggtagaaaggggtgacgggggacgggggcgggggcgggtggcggcgcgggggtgagaacccggaggcggcggggccctgggccgggctgcccgcgggaccgcgcggccgcctccccccgccgccgccgccgcctccccctcctcctcctccgccgccgccgccggtcgcctgtctccgcgccgggcatgcctcgggagccggggcggcccgggccgcgggcgctctgcggcgcatggacggcggcggcgccgggcgagcagcgggaggagaaggcgcaggcggcggcggaagcggcgacccacggctgggagcaccggcggcgcgaggggacggccggccgcccgcgaggctccggccccactacttttccgtagcctccccacctcagcagcacggccgccgccgccgccgccgccgccgccacggccacggccacggccccggccccggccaccgcccgccgggcagcccagagcgccgcgcacggccgcactctcccgccaccccacgcacacgcacacccccgcccgcccacgccccccacccgggaggggggagagaggcaaaaagtaagagaggaaaaaaaatagcaggaagatggcgcccaccaagcccagctttcagcaggatccttccaggcgagaacggtaacacttttctgtttattgaacctgccgccgggccgctgctcccgccgccgccgcctccgccgccgagggcccctctccgcagcccgcccgcctcctgggccgcgagcccgcggggacctcgtctgggcgcagcgctcgcccggggccccgcgcattgtccccgcggcggctgcggcagcgagaggctctggcggcggccgggctctctgagcagtcgcacctcctcggctcggcgaatagagtgactcactgacaaaaaaaaaaaaaaaaagaagaaagaaacagaaaagagaaaaagaaaaagaaacaaacagatgcgaaggcgctgccgtgtgacgggagcagcagcgagggtggggggccggggatccccggggccgccgcaggtcccctagcagctgctctcgaggaagggaatgaggctggggagggggagggaaggcggcgagcagggggaggaggcgaggagcaggaggaggaggccgggggcggggagcgcggagctcgcgccaggcccggaatgtgtcgcggaggggccggctccgtctccgcgcgagcagctaggccgggccgagcccagaggagcgcggccgccgcctccctgcctcccgggctgcgccctccgctcggcaacttgtgggtctcccgctctgccctccgctctcatcttcccctcctctccatacccctcccaaaggaaaaagaaaaataaagaagaaaaccctcaaatccaaataagcaaacaaacagcgagatccaaaatgtgtcagcagttggagcatctatgccccgttagttactgtttggggatctgtgttttaaaaagttcctggtgagaattgcatatccaagcaaggggctcagtcgagcatgtctatttgaagttagttaaactagtacagccacagggaaagggagtttgtgttcaaaatacccgtaactgttctacgtgagtagcattgatagattttcagagtaactcagcaccccctccccatcaccaccaacgtggttttccctcctgctgtccacccagcctactttctttggaatcctatttactattaattggcaacgttaatgacattaattgcatatagcatattggtttgagcaaagtggatatctctttctgtctccgaagaggaaaggcgcagtaggaagtatgaaacgtcacccactgattcatgaggaaaacaaatacagtaagatatatgcacccccacccgcagcaggcgcgttgattttcctcacaggcttaagtgaacttgaaaagaagacaaaggatgtgcttagttgcaagatttaattattataacatagttttatttttgatgcaacataatatttaacctatagcttacatcagaagacgataaggggatattcagacatccattcatttaaaaggcttctattgtactgttgcttatttctttcatacgatagggaaggcacaattgtcaggattaaggaaatacttttgttaagtagatacataattgactaattctgaactctagatgattctgtaaacatcatatatcagagagtaaatcatacataatccagtttttaaagatgttaaatgtgtatagcattaactattgctcccaaactgtagaaaatctgacaactcatacagctaaaatgagtatttacttcttaagaagtatcagtgtttcatgaagaattcacactttactcttgtagtagaaaaaataatttctcagagcattgtgcaaggattttaaaaattattttttatctaacatgaagatgaatactttttgaaatctgaggtttataattggttttcttccccctcccctcccctccccttccctcctccctccctcccttcccctcctccctcctttcccctcctccctccttcccctcccctcctccctccctccctccctccctccctccctccctccttccttccttccttccttccttccttccttccttccttcttcccagttctgttgttaataaatatgtttactgggatggccccagtaatctctctagcaaaggcctattcgtgtgccattttaggaatttctctgagataagaatctcggagatagaattaatttctaggggaaacttcatagcctgtgcatgagtgcgttctttatcacctgtctccatttggcattcgaagaaggtaaatcaaagtgtgcgatttgttattctgctccacttgagagctgaactaaataacacttggtctgaaattctgattgaagttgtaggaggatatactgtatttaatttaatgccctttaatagcatcttcttgttcagcttggatgctgtcattttaaaggttggatctgagaaggtttaacctgtatggagaaggaggagtaataacagcggggtgggggcaggagcactgtggaagataggaaggaaggagttataaactaaacctttcaaaaggcaacaaccgcaaacttggtcccttatccaaacagttgttttatgccccaagggttcactttgttgtcagggttttaaatgctcttaacactttaagtgtaaacattacacatgtaagttgatttggctttgtaatgagaaatgggaaatcagatgatttgtttaggagggggctgtttttcatacttgcttcaagtaagtgagtaattccacctttatttgcacattgtgcctagaacttgttggttaacaagtatttccttgtagcagttgaacacaaatatgtttataaaagatgactttctgtggatatgttttaaatggtatcctcctatttatttaaaaaaatgttttcaaaatcattgatttcacagaggcatttatggacagtttattctttactgcttttcaaatatattagtaatctgaaacttacagagaaaaatatatcttttgaattgtctcatttatttatgaaatgtctaacctgtgtatagtaatacagtaccaaagtcatttccttatagtaatgtttataatgtaaatttcagaaaaataagctcgttcttgataatgtctttggttactatttagtgctccttacatttctctgaattacatatacagaaagtgtctctttagagcctgaaagaacaagttgaaaaccttgtgtacataaacttgtttgattttctttaaacgccaatagactgcaaattatatagcactaccacaaagtttttctactatgtggatgtataaccaaaaaaattagacagagagaagtgtcaagcatgtgatatgcccatgctgatttgcaaagcgtatcccagtagcacaaggcttttggtttaaaaagtaaaggtggtggagactggtttttggaggtatttctatctacagtataagcttaaataggggtgataaatgattatatgcattgtctaacacttgcttatatatataaatagctccacaagattgcttaaatgataatcgaaaatatgaaataggatggccttcatatcacaaggccaagggtctacaaatggaaaaactgaaataatgaaatatttccaaggcaacagactgtcaacaagaactgtaatgcatgggcatatcatgatccaccagagaggatattagatcgtatagctccagagccaggagttataatgacctttattatgtaagaccctccctcattacaacatcttttcagatttccaatttctgatttatgaattgaaagacatataactactccacatgtgcaatatgccaatcactagatttgattccttacagtgagcaaatgagcaaacttgaattcaacattattcgatacttttttttttttaaagttacatgaggtgttttcacctagtagtgttattagtaaggttttggtttctgtgtctttatatagtcttaaaaatatggctaaaagtgatgtgtaattaatatctcagcaatcaattggtaagacttatactgtacttcaaatataatccagaaattggagcagtttgataattttagtcatatgaattttgatcttcccctgtaattcttctacccaatggctggccctatactataatatagctattttatgagaaggccagaatacttatgaaccaccttactcctcttccctgccccagatcctggtctgggattcagtgctatgttacaattgtgtctgtttgaagtaggacctgctgctaggatcccctgctctgtggtgaggttttctatggcttctgtaaagcaacacttttggggaagcattatttattttcttaagcagtaggtcttcatatttggggatttcttttttgtttctttatttcttttctttttctttttttttttttttttagacagagtcttgctctgttgcccaggcatgctggagtgcagtggcacaatctcagctcactgcaacctctgccttcaaatgattctcctgtctcagccttccaaatagctgggactacaggcacatgccaatacgcccagctaatttttgtatttttagtagagataggggtttcaccatgttggccaggctggtctcaaactcctgacctcaggtgatctgcctgcctcagcctcccaaagtgctgggattacaggcgtgagccactgtgcctggcctttatttggggatatttatggagaatatattacaaaagtttcaaaatccttttaatgctttcctctactaacttccttaagtgctttactattaataatgaccctaatgtaaccttaatctgtttttgtttttctacaattctagtaaacctatgtcttatgcaaaatgtcactaaatttaaagaaaattaacactcatgaaagcagaggtagctcctgccacctccatgctatgtttacacagtcactttttctgcgtataacatttaatcattctaattgattttttaaagttctgcattgtatttgggctacagtctaacttcaggtgttttatagacgtgtctttaattgcttaggatgaataaggctgaaacttagtaaataagttagtatgttaaattttacttgattaaatattattctttaaattttaaatgctatcaaaattgcacataatggaatatgtgaaactttaaatatatctatgattagtaagaactagaatttatcagaaaatccaattgtttgcattcggtgatgttagtattttcccagtaaatagtggccttttttcccccctcattggtcagtgtaataaaccaactgtaactgaatggtatttttactgcgctgagcctcattagtgtgaataggatgtttgcactattaagtttgatagaatagttagaagaatgtgtagtaatattagtaatactacaatgcataaacaggacatggcttagtaagaataaagtaactgctactgtatctgaaatgactagggcagtgacaacattaaacaatagttgaagttttctgtatacatttgtaaaacatcacgtcttggtgaattaattgaaatactgtggtcttgtatgtgaaatcaggggaagcaagatgaagatcttatgttactatggcccacagttctcctggccctagactgtaatgattgactggttctttcattcagcttcatttattgaacctctaccatggaccgtggttatgcgtgccaggtacagtactaaatatataccttgtaagagcagttgctttggttgtaggcttgcccttctattggttatacaaaatattatagagagccagaagatacccttttctaaaagagtaagaagtaatgaattcatagaaatataaggctttcttttttcacttctgttagcttagtgttctgtgaggatagttattcaacttgtaaaatattgtaattagtgactacaaagtgattagaggctcctggaggacagagagagaaaagatactgtataaattgaagtgaaattgtagtaaattttataaaagttattttgatgggatttaaaaataaaaataggttatatacgatgatgattatataataatataaacattggacactgccatgtttcagacactatattacatgcttcacaataattttctctttagtttccccactgacctatgagggaagtgctaatatccccatttatgcatgagaaaatagaggtttagcattcccaaggaaggtgatagagactgaattcaggtttgtctctcaggtgaacttaggcagtacagtctttgtagaaatgtaccttaacaccagtgtggaagggcctgcgttttcagactttccaaactcagagatttccgagccaatatcagagagttccaatggcagaaagaccagttcactatgggtagtgaacgatagccctctgttttggtccttcatcagatgtttggagaaatacagtgtttatgaaattagagaaagaatcaatattgaaagcatcgttacctcaccctttactatcccagtagttttgtgggcaagctccataactatacatacttcagggcagatttgtagctgagtggtgccagaagaatcagtttgccacgtacatctgcctctttggtcacagcatatgaagttctcaaggccctcttctgctcatataattcatggctcagagtgtgccacaagtttctctaaagattatagttgaagcatttttattttgtgatagttttgccactggttgtgtaaaaactgtctcataaggctttctgaataactcattttagtacctaactgtatttctggacattgtcttttgaaatttgtaaggatttgtacaagttggcctcctgccaaattatctggcattataataatggcagcaagcatttatatagcatcgtgtgctaataaacaggtactcttctgagagctttacatgcattcactcatttaattaaaaacatgacatgttaaaatgggccacaataaatacataaatggtaagttatttactcccccatccccccaacacacacacacgcgcacacacacacacacacacacacacacacacacacacagagtcatcttcaagaagggaaagttagcctttggtaactttttttcctctatgccaggaaccctagggttggtctgatacataacagttctttaacaaaagctgtactttaggaaactttgtagcgtgtgatgtgggtgttcattgcagaatatatgcaagatctcagtagcagacaaacatgccacatttatctttacgtttttggatgtaatattgtcaactaaatagcttctttaaaaataataggtataatagaaatttcgggcttaaaaggactagataagaagtgcttgagtatttgtgattgcaagataattcgcttgtgtattggattcattttttacattcagcaaatatcttgtttatgaaaggataagttgccttttaagttgcaaaggacttaaaatttaaagggatattttactgaaatattgaagataaaaaacaaaagtcaataggaagtataagtgaaaaatagactacaaaatttttaaccaccatcagatcatcttaaaagagattacatctgattacattattatattatcatcagtatgctaatgcagaattaaagggctgtgagttgggtacctagtgtaaaacattaaacttacaaatcttaattgcatattttggaaagtagtgtcccacagcattttaagaccactttataaacttataggtcatttcaataatatttcattatatctgatgaactagggcattttcatttgtaagatttataaaaataattttcttataaagaaaaattaatattggattaagggtcaatataagtgtgaatatagctataattaacactctcttccccaaatctctgatttttcctttctgctacagtaacactgcggaaaaggatgctagctctaaacttcattcagaagcactttagctcagaaagatggcagtatttcaatggtggcaagtggaatgattgaaattgtttgcagaacttctctctctggtcctagaaaatggagacatgaatgaatatggatattttattaactagtatgtattgtgctgatggaaggggcattttccctttacaaatataatttattcatcagaatccacttctaaaaacatatatattctattcaggtatatgaatttttttaattatacaagatttttgtatatagtgtacacagcatatatatgtcacatgatacacacatatatatacactgtttacaacataaattatatataaaatatgtatgagatataccatgtttgtgtatgtctatctaaaatggaaaaaagttacaaagatatcttgaacattataaatgtcttactttagattgagttaaatttaaatgtatgcagtggattggtgactttttgttttcctaatgctgtaaggcaaagtaggctcatcatttttttttgcacatttttattgttctgtgtaaatgtaatttgttaatcctgtgaaatttgtcatagataaatttgcttggattatcttgtcaccaccgtatctgcattcttttgttcattgcttattcataatttaacagtctggcagtgagcctttttgggatgctcacaagagatatatgacctcttccagctgctactataacctgcagaatgcacagcaagacattagaaacgtgaggattcctctactgattaaagtgctcttcatttaaacagtctgttcataagaatctcaggaatctcttgctaccagcagtttttagttttttcttcctaacaaaattagttttaacaattgaatcttcatttgctatgaatttttcagattatccaaaggaagttaatttcttgaatgctgtttcttctttatacataaatacttaaaaaatttatattttggggatgtcaaagttgtccaaaaatggttttattgggcagtgaagaatgtagagtagatatattgcatcctaatcttagaagaaatggttggtttaatcctgtttgaatctaagaactttacagtttatattcaaaacactccatattatgtagtatgtagcagacattaaaaataaaatgttacttgaagtataaccccatctttaggttttcattattctgaattagtttagcatatgaatttattcttttctctctctttgcttctctctttctgtctctggaaatcagcagccatcagtttacgagcaatggttagtttttgcctctctcctgtgcaggcatatgattatggttcaaaataattcatcgctaatccatgcagtattggttcatctccatcactctgttctgtgattagagcctcaggcctgctgccttgctttctgccctgattttctttaactgcaacctttgttttaatatagttctgtagtcaccactctcctaccagcccctctccattcctcatatatatcgattgcggtagattaatatttatttgaagccatttttccagactttgagaaaaatgtattcatttcttactgtgacccttcatctaaagggagcggggagagggaaaatgtagggctcaggtatgcaactcttagacaataaaattattgtgtttcccgttttaattcttcgctatggtcagcgtattttactttttacagaaatcaggaactttagtttctttgaaaaaattttatacagggtaaggcacaatgttaacagtttaactctgtgtgtttgtaacagttctagaatggctttctgtattttctaagtacatgctacagccaatgcaatcaccataatatacattgatcagcttgcattgaatatttccagacagggacactaagctatcattttccttagcatcaaaatttgccacttttaccagaaggtcatctaacagatttttaaaagactttgtttcagatctcggtagtcctgtgttccttttaataattactttagtctcattgtagctgtgtgtttgaaagtgtaggtcaatgaggatgattgcattcagaatttcatgatctgtgtagtggaacaaattgaaagcaaagcctgtatcaatcactgtgaagggagggttaattgttaccgcttctcaagcctctggacagataaaccagtaatgaaatacttattgctctgatatgtgaatgctaaaggatgaaacaatggaaacagaagccgtcttcagagataaccaaataagcaaagagaaaagaatgaactagatgaaagtatggaactgtgtactgcattaactctcttaaagtaatattatttttagtctcctacccatcttttactggcaggttagggcagtatcatatatcaggttgataaagccaaataagaatataaatggaaaccatttttttctgttaaaaagaaaaaagaaaaaaggaaaaagtccagccctatgctttatatgaactctgtatattttataaaaataattatttcatattactaattatatcactgtttaaggtattctttttaaaaaaattagttatgctacatgtattaaatttttatatgcatagatgtcttacattctagaatgttttaaaggattgttttctttgaagagattttggaatttttggtttattatacaccaaagtatagaggaaatagtgtaatacataaagaaatagtaaaataagaattagtgtggcaaagaaatcatgagattaaatacatttaactatttcttccatatgaacttaacatttaaacatccgttagttacttatatgttgaaatatatgcaaaaatatttagccaaattgaagtcttaggtccatgacaatcatctcaacacagtgggtagttctgaaaattaatgagaatgataatactgtaaagactgttccagagtttgcccaaattcattatctaagactcttgttaagaacatctcaaagaattttaaccaggaaaatatattaatggttcaaaagcattttcaaagccctgaattacaaaagtataatggaattatatatgcaagagttatagttagcagcacagataacagaagcattataaaggcatatttttccataacctatactgctcttgcatgtggtttcatccatagggtttaatttcatacatgcatatattattgctgttaggatgagaaagatcaggatcatttaaaaaataaaacatagggaagcttataactataaaaagttaggtatatctacatttcagcatccatttcagatgtgatacaactactagcaaggtacaacaatcttaacaaaaagaaataatcttcccacatctttgtatttacctcagaatgttaagaatttcctgaggccttaatctgtgccgtattgatgtggctgcatagcaactgaaacaaatgattgagacatagccctttttacgatagtgacaccatcctctagctaatgtggttttgtgtattttaaaagatagctgtaatagtattgccataacattgctgaatcaggatttttaaactgccagtgaaatacactaggacagaagttagtagagagctctcaaagtcaagatgcaccaaaaggtgtcaatctttgtgtacaacaatgggcaggcaaaaagcaagagttccattactcagtaataaatgtgtacttaagacagaagcccgtggatatcgagattgtcagggcaatacattatgaattaccactggttacttgctgcttgggaactagtgcagcagcatggaatggcataaatcctggtcaccagtgtcagtcttccattatctttgtaggaagttgtattctacctaggttctttaacctttcagagcctcagtttctttattttcatactgagttgctaatacctacttccagctgcaaaaatctatgattatgtgatttgaattatgtggatatataatataaaataatgagatgaggtattataaatggcagattgtttttccaatggcattaacatttacaaatattccatatttataaaatgattaaataaattttttatgtcaaatatggtgcttgttatatagatttcagtccataaaatataggatgttaaatatttttcttcatgaaaacatctttgaaaggaaacatcttatttcaagagtgtccagaggactttgcaatggaagcaataggatgccttaagttaaattttaaagtgacatatgatgctaagactcaatgtaacactaaagaaaaatactaaaatgtttggagataagtacatttgtttcttaaattcaattgagacagtagaagaactctggaaatattggaaaactagatgatatacaatgaagaaggaagttaacaatgtaatatttgatggataggcaactgcttaagggaataactaatctctgaagattttgtgtgttcctaaaacatttatagaggaataaatttctgtagtgagatagttacccaaactacaacagttatttatttctttttaaccttgtttttaaaaagcactttctcctaattcttctcctttacttgtaaaggtgaactgatttggggtttgtagtgcagacagatttgaagatttacgagtggataagatttcttacatctagtaaattaatgacttttaaaatagaggtatcacttatttatggtttctggaaaattcccaattaatgatacttaataggtattgcatgtatatttttgtaagatgattaacttttttgcttaatttctatatgtgtgtgtagattatacatatattctatgtatcatatgtagattaagagtatttcatccctataactatgtagttatagctcttgtcagtaataattgaatataccgctgataaaatattgttccccaaagaaatactcagttctacaaaaggtaattttctatttttccattatgaagacacttaggaaaatgttttaaaatgttataatgtgtactagacttccgtaactcctttttccccctcatcactcatcaaaactctgttttcctgaagctaattttggctaggtactagaagatgatctgattagaataattcagagttaggggtgaactttatttgaatttttaaaatgagcctatcaaaacaaacatgttttcaattaatagaacatgaaaaacctttagtgtgcccttgcttgtctcccataccacgcatatagatacattagtcaacactttgaagtacctcccctggaaacaatgtctcatagtgacattgttttagaaaaaaaaaatttaattttatcacaacattgagtataaaaatgggtaaatgtcatgaattgggttaaatacctgtgttgtacatattttcattgctaaccatatttttctgtctagttaaaagtcactaactgtggtaaaaatctaccaccaatgaagaaatttagaattgagtgatacgtagtgtcaaccaaaattggaaatacctgtggctcatgcttgtaatcccagcactgtaatcacagcctaggcaggagaatgacttgagcccaggattttgagaccagcctgggcaacatggtgagaccatgtttctacaaaaaaataacattagccaggcttaatggtgcacacctgtaatcccagctacttgggaggctgagggaggaggattgcttgagcccaggagtttgaggctgaagtgagttatgttcataccattgcactccagcctgggcaacagagtgagaccctgtctcaaaacaaatcatcaaacaaaaagcaaacaacaacaaaaaaccccaaacaacaaccaaaaaaaaagaaaaaaaaaaaaacagagttggaaatatctactcagtgttgaaatagaatttaaatttgggatttatagatggctatagtatttttttgtagaaaggcctccacagcaagtatttagacttgggttgaaccaaaccacgttagacttcacaagatctggaccctttccccctcctgcaactgttttcatttactaagtgttgtttcaaggataaacaccaagctgtatcctgctgctattcacttgtaagcagcatctatttcatacgaggtcacaaagactttcagtaggccctgactgagtgaggcgtcttctgtcctgtggtccatcagtgttgtagcagtcagtgaatgggcttcaggaaatccaataatctactgaaacagcatcttcataccattttatcagttattcgagggggtctgttttccctaaagatctatgtcaagaattgtgaaggatcttagattttactctgcttgcaagccatggcctgccacactttaatgaatgccgggtcggagatgaaggacagtttattactcacagcattaacagtagtcagaatattagtgtgtaaggtaattatctgagccccagttcccacagggtgataaaaagagggtcaaatgatacctgcacacacagtagtgcagtaggttgtgttacaagaggacccttgagtttagggaacttgaatcttttaaaacaggcagtaaacatgtcttccttttactctggaggaagacactgtgtcttccaagactgttctctgtacagccttaattaggccttaacaaaggacagttaatagtactttgtctgcaagatgtgcagaaatgtgagagacatagagacttgtctctcaacaatctgaagcactaaaatggggattattatagaaggatgagaggacctagtggtggcatagtcctgtagttgagagctgccttgagcttaatgcaacacaaagtcaacaatttggagagaaaatgatgaaggttccaaatatgtaatcttccccaaatttcttaagcattaatcatgtgatggagtacaccaggtttgtttcggtttagctgattcagtagtggatgggtcctaatgatgttaatgtattcctgttctcatgtcttctatttatcactgttggtgtttgtcctcttttgtaagcatgctcgcttcctggtttgttctatttacccataaactttaacttgtttaaagttcactttttcatctttacattagatcgcttaaatttctccataacccaataagataggttctgtaatatttctcttttatagatgaggtcatagctagtaaagttttgaaattggatttaagcctcagtctggactgatgggatgacattcttttaccatgttagctaccttctgactcttgtaaagttgttttctagttcattctttcttctggggcccctccatttccccacataactattctgcatcatactgtttttctcttccctatacccttctcctaatcccagtatgagtctagctgaccctatagctctcctcttctatcttgccttttaatacctcccatagacattgtcggtattaagcatttttgcactctcaaattgtactaaatcatcaccttacttatcttctgattccatagtaactgtcctgtaaagctaatgattgcaattataacataaataggttgaccaaaagtttgatcatgcctagcataatggtgaggtgttacattaaaagatggttatgaggagattacaatcttgcttagcaagttgtaaactgtagttctatttcctgcataatttataccatcttttcgattgtgaatagacatgcattttgtaaattatggtggcatgggcattcttatggtcataatatattcctaccttttgcatggagtcacacttttgtatgtaccataagttgttattgtagctcacttaaaaggcttggtcaaaagaacctgtggcttctggtcaactcagattcaattttaaaattaagcattcacctgcaatcaatgtccaatgatttggcattttgctttttccctttctagtcttctagctcaaggtctatctcaataggatataacaatatatataatttaatgcaaattaattatcgaagtgtactctagtaagtagtgagatcacacagaccaaaatatactttgttggatacattgcagtctttctctgcaatgggactacttatgtaacttacataaacgtcagtccaatatgtttggagatcatgctaagacatcaagctctaagatgctcatgaagaggagacaagataacatggaaattatctgtcttttgagaagctgatcatagttcactatcagaatctattgcgaaaactcaagatatccataaccaatattgaggaccattaaccaaaatgatggatgatgaagaaataaaatatagtcttcttctgtacctgtctttttacataaattgtgacctttctagaagggaacaaattggtctccattttgcacccccagtgctgaaacaccttcttggaacagagttagaaaatgaaggaataaatgaattccagttctaattctgcctattgatatttacatttcatcccaggaatttcccatttctgtcaaaaatctacaagcacgcataacataccccatgatctcagatgtaaaaaagaaattaatagagaaatataagcatttttcaatatgtatttttaactaatgcttagtaattcctagtgtattttgggtttcaaaattgaattgtttatatcctatgttgtggggtccctgaagattatacccctgtaactctacagataatagttttagattcaagatgtgtcacagctctctattaagcaaggagtaaagaaaatcagttacaaccaaatataccattgatggtttttttttaactttcaaatgataccaccaaatagatgaattctggaacaatgaatgatttcaaattagaatcatattaaaaccattttatagtcaattataattccataaaatttgaattgcattaattctgtatttcacaaaattgtaccaataataatttaagttgattaggccaaaattgaaaaattcgatcatgtaaaatagaacaggttacaaagagggctgacagtttttctagggatttctcctctgttggcacaattcagttatcacatggccttgtgtatatagtacctataacacaaatctttgcactgaaaatatcatgcaaggttacatgaaataaccacaattaatttagctcctcaccatgattgattgatagtggtgaacattgttatttcatacaaaccagtagtgagctaaaccttgataaacttgcttgaacttaacacattaaaagaaatgaaatcattaacagctccagggaaagagtggatcagtagttcaaatatacttattcctttctgtctttactctggacatagcttactttctccaaagtttataatctgttgacactgaattttgtctttaatgcatattagccttattcagacatattgacatatgtcttgaatacatgttggaataaaatttaaataccagtttattaatgcacaggtaaggaaacacatccacttttccaaaacccaaatcacttttgatatgtttatgtatatacctaagtatgtctgaaaacacatctaaaatatgccccctctacacactgtgaaactttggacagagatctgctctataacacagttagaaattctattcagtgttaatattgaaaactcaatctattggccaaaacctttctatttttccagtgagagcactgagttccacaaaccaatataaccatgaatggctatttggtgtggcgccttagcatgatgatgattttagttaatttgtccaaattaattctggcttcccaggtccagatgaaactggtcttctatgttcagtgtctgcgtgggaagattgatcttttttctgaaaaacatatgccatctctatactatgctcttcttcccagaaaaagctatgtaaatatatatgttttacagttttaaaaataagattttaataattactggttatttcactgttattatatattaaacatagtgataagctctttattaactttttaaacatttgaatttgttaatttgtaacttatctttgatatcttttaagtgtgggttattataagtattcattttcattttttttttttttttggaaatggagtctcgctctgtggcgcaggctggagtgcagtggtgcgatctcggctcactgcaagctccgcctcctgggttcacgccattctcctgcctcagcctcccgagtagctgggtctacaggtgcccaccaccacgcccggctaatttttttgtatttttagtatagacggggtttcactgtgttagccaggatggtcttgatctcctgacctggtgatccgcctgcctcggcctcccaaagtgctgggattacaggcttgagccaccgcacccggcctaagtattcattttctattccagcattctattttgcatttgcctattctcttaacaatttagaaagctaaaaattttcagttttgtttaacagagttactcccttatcctttggactgacttctgtctcttagtgtggggactgtgcacttcttaatcctgaatttggtggtaaaatcacagtaagcattatgggcttacagaagttctcattatctctgagatttttaggatgggacattttgtagcataagtgtagaaaaactagctttggaattattgcagttacattcactgtccaccgctccaactcagtacagaaaagctccagtttagcttttacattataaccactctttgctgtactcctttaactcagactcacccagcatttccttaaatatacttcatcagttcccctcaaagttgggcctttccatttttaattgccacctaaagatttatttctctttttataaaagcctgtgacccctatggtccaccttggtttttttcatcttatatattatttaaaatgaaagttctcttcccccaaataactgaatgcttccagaagggttaataacccccacccaccaaccccatgaacctaccattatcttcagtctttccttaaccaactacattcagcttccttgtatacctccaaacctgaggtcatctgctgccaatagacactttgagttgttatcttccataatctcttggcagcatttgacgctgctgatcactcctttctttttgagatactctgatccctggacttccatgatgccatgcttttctggtattcctcccagttatcagtttggtttccagagttctgtctgggttttctactcgtctcattctgcactccctccaggaccctggcattcattctcatggcttcataaaaaagactgaagatgctgacaacaccagtttctcatttgccatcaagatctctctccttgtctctaaacccgtatatacagctgtgtattgtccatggccattcatacttcccatggatacctcaaactcaatggaacccaaaactgaattatacaatatttagcacatagtacatgctcagtatattatacatgaaatgagtgagtgggtaaataaatacatgggcaggaaacacactaaactttagaaaatgaagtagccccagaacaggctcataacaaaatggtgatggtggtagtattattttgctctgccaaactataacatgtaagtcaggagtgtccaatcttttggcttccctgggccacattgaaagaagaattgtcttgggccacacataaaatacactaataataacgatagctgatgagctaataaacatggcaaaaaaaatctcataaagctttaagaaagtttaagaatttgtgttgggccctgggttggacaagcttgatgtaagtcttgtttgctttgaccagtgaaatttgtcctttttaatctctctttgacctcctggtttttagacacactatttgcttattttgactgatttttgaacttctttatttctgcctcggtgttcttgctctgaaacctttgctttgcttcttttgccccagaaaccacaaaacctttaatgccacacttggcctggttgttactaggggctgcctggtatttaatacagttgtgagggtgtgtgtgtgcacatgtatgcatctgtgtgttcacacttcaactgtagttcaagtaaagattccaaacctaagtaatgaccttgagtctaatgttattaaagttataaaattgaaataagctaagccttcagaaaactatgtttacatttacgtgagtaaatatttcatatactttgattttattttatttttgccagtttaaaacttcttttctttcatgaaaccttctgcagcctgcatgaattgtgttccagtttctcatagacagagacttaattacgactatgatgtaaaggagtgagcactttcacgtagctgcatgaatatacacatagtgctggttttagaagcgtcgggcatacttcatttcctcagtaacagcatcactactttgtgtcgagattcccgagtatttttgggtttattgagaggaaaactctatttgctgaatttatcaagtagcaagcattcatgtagtgatggtatctatgttctttctatgcccacctatacccacaaagaggggatatgctgactgaagtcaggtagcttatgtcaactggcataaacattctatgaatgctacgtaagagacacgtgatatctaatgatgttttatgtgagtttcaattttttttttttttttttttggtgagtaatgagtacttaattgttgaattaggcagatctgtagttcttcctgtccttcccagtatgtattagggaactttggaagagaagtgtaatatattggttatatgatagtaataaaacatgtggaacaactttaaaagagagatcacccgagagggtttacttacttttatgttttctttgtatttatgtagtttttttttccattgacttaaatattctttacatattccttacactgattaccaaagttatgtaatgagttctggagagaagcaggaaaaataatatttattagagtagccatggagaagccatgtcttatgtttgtatccttgaacatttcttggaacagcaggagaaaagtaaaaataaaatcagattttaatataaaaagagtcatttttgaatacaaatggaagctaaaaagacatacctcttccagcgcttaatggtggttggctgagagagcgtctctgacaaattaccaagaacaccacagtggaatgtcaaattgtagaccattttttaaagggaagggtgagcagctatttcatgcactattacagctttcattaattcagaagtaataaaaatggattttcttcattactctaccaattagtcaaatgcagtcgtccatttatttgttttttaaaacattatttggatttcttactatagaatgaaatcatttcatggccatgaattttattcatagtgcatatatacttatgtgcttgatgtggaattagaaaaaaggaaagaacttacataaaacctagcagtgatcatttaagaaatagtagcagatgaaaacctgcaataagacagctttattcattcataagaaccctgacagcagcgttttgtgtttgggttagttttgttttcctcagcacatgtgtttaaacatgttcactaacctctggaagtatttagagaaatgtttgtgcagcttaattctccatgtaagtgataatttcatggcagctcttgaaataaacatttttgtttttgaaaatattttgtgactatttctattacagaaacaaatgtttaaaactcaaagtgatatttgaccagtaatttgaaacctaattacaattctctgaaaaaaaatgtgaattcggctgggtgtggtggctcacgcctgtaatcccagcactttgggaggccgaggtgggcggatcacgaggtcaggaggtcgagaccatcctggccaacatggtgaaaccttgtctccactaaaatacaaaaaattagccgggtgtggtggcgcgtgcctgtagtcccagctgttcgaaaggctgaggcagggaattgcttgaaccagggaggtggaggttgcagtgagctgagattgcaccacagcactccagcctggtgacagagcaagacttcatctcaaaaaaaaaaaaaaaagaaaaaaaaaattgaattcatatcggattgtagtactgccaccttatattggtcctgctgttttcacactgaatctcagtaacgtgttgtgataaattgctccatatctccaattgaggatgcctcttcatcatcaatagtgtgcatatcatgtgatatcctacagggacacaccttccatcatcatcatgatcattgtcatcatcctcattctcatcatccttgtcaccatgaatgcaacatttcttgaactttgtctcagtcaccatgctgagagctttacatacattatctcatttaattcccccaataaccctctgaggaagatatatccccattttatagatgaggaactaagtcttttagaagctatgaactttgctactcagtcaccatctcatttagattctttttaggaagctaaattttagtggtaaataaaacataaaagagtgaatacagtggcttggaagttcaaatacagaatagaatattgatattctgttgcctaagtgtaatacaaattaacacaagttagttatttactctaagtaaataattaaacacaaatataaaactcctcaaataatgttcatttgcagctttggggtcaaaacaggtgataagaaaaaaaaggaacctgaattaacaaatattttggtacaatgttgtgttgctttttgatgttagtaagaaactgtttctatgtggatttagggtctttctgtaataaagggaaggagaggacatgtgggtgatattttgaagaatttctgcctgtagaggaggatgccaaaaagtgagttggtttattaatattggtttaaattgaaaaacgtaagactagattttttgttattaaaacgaattttgaaactattaaccactactgatttatttcaaactgcaagtaataacattggcataaagctggaacaagacaaaccacttaataagccattaataaatgattaaaatgtcttaataagaagatactgtgtttataaatggtagcgtattaaatgcaagtattaacagatagattactaacaactgtgaaatctaagaaaatgctaaaatttcagagtttataccacaaatctttggggggtagcttttctttctttctttcttttttcttttcttttttttttttttttttttgagactgggtctcgctctgtcacccaggctggagtgcagtggtgcgatcttggctcaccacctcccgggttcaagcaattttcctgccttagcctcctgagtagctgggattacaggcatgcaccatcatgcctggctaatttttgtatttttagtagagacggggtttcaccatgttggtcaggctgttcttgaactcctgacctcaagtgatctgctcgccttggcctcccaaagtgctgagattacaggtgtgagctaccacacctggccaggggtagtttttctttctttttttttttttttaaagaggtggggtctcactatattgcccatgctggccttggtctcctgggttcaagtgatccttttgcctcagctgcctaaccacaattttaaagtgcacatttccttctaattcaagatcccttcatctcctttcttttggaaagtcatctatcatttaaatggctgctatccagtggcttttctcatagtggtgattgctgacgattctgaagaaagtgtaaaataatttaacgataaaaactatatcttctgaggctaaataacttgctccaaaaaggaaggcagttctgaatgcaaataaataatggcaaaataaggtttttttctgtgtttgctgtaataggccccatattagctatctttcagattttaaatacagagtaacatttgataagaggagctttgccaagtggaaagaaacagcagataaggacattaaattgaaataatgagctgctaaaaaagataatggatcaggctgttccaaagcaaatcatgggggaaaaaagaagggaaaaactttgaaactgggttctccagctttttcagacaggttatccttttacctcagcaaagtgctggctgtgaggggagggaatggagtgggtattccctgtataattgatgccgaggagggtagatcgcaatccctgcacgtacttactgacgtggtggtccacagcttccacccagtttgtccccttcttcccctggacaaataatccaagagacagaggcagtcattagtgccatgatcgactttgaagttagacagaattggactccccattttaatgtttaaattaattttacatttaaaattaatttttagtattcaactagaacttagtagatgattcaattaggtaatgcattggaaaatgctttatagattctaaagttctctgtaagtagcaagtaatatgataattgcatggcatgaatgatcctgatcctcagtattaggacttttattattgttacaggataaagaaaaatacactgagaagccatgatttgggaggtctgagacaccattaattaatggaagattcagtttttcgctatccttccttggtataccttaaaatcatattcaaagaataagtattttgcccttactaaaatgcaaaatccaaagtgatcacatttacaaaaaatgctgatcagaatatagacaaaatgaccgataatatccaaaacaatattatccccaactgggaaagtttcttcagcgcttttgttctacattttgctgcactaaaaaaaaaaaaaaaaaaaaaaaaagagaacattaattaatttagtatttgctatatgcatgctatactctgtgctaagagtgttttttgtattcttcatttcttattcaactctatggggtaggtgttatagccactttataaatgaggatgtgaggaacagagaggttaagtaaattaccaaggtcatataactagcaaatttgatagccaggattgcagtctatgtctcctgaattccagatcccacattcctatccagtacaccatatttatgcaaactgtgcggaactctcaacctcctgattacttaagttaaaaaagtccagtggttacatatatgcatacaatgtgatataaatagagaaagaaatatattaatgaagatgtttaaaattctatatgagtagaaaaaattctgaagatttaatagatacatctgttgtaaataggcagcccatatattctgccagagaaaggttatacattttaaaatgtgtaattagagaagcctaaaacaatggcagtttgaggccgggtgcagtgtggctcacgcctgtaatcctagcactttgggaggccaaggcaggaggattgcctgaagctgggttcaagaccagcttgggcaacatagcaagacccctgtctctacaaaaaaaaaaaagaagaagattagctcggtgtggtggtgctaagcaactagggaggctgaggtgggaggatctcttgagcccaggagttggaggctgcagtgagctatgatcacaccactgcactctggcctgggtgacagagcaagaccctgtctctgaaacacaaaaagaaagaaatggtagcaaaacaaagtattgaactatgaaaaatagaaaacctgagcagaccaataacaagtaacaagattgaatcagtactaaaagtctcccagcaaagaaaagctcaggacttgatggattcactgctgaattctaccaaacatttaaagaaaaactaataccaattcttatcaaactattcaaaaaaattgaagtagagggagttgatccaaattcattctaaaaggctaacattaccctgataccaaaaccaaagacacaacaaaaagcaaaaaggccagtgtcacaaattaacatacatgcaaaaatcttttaacaaaatactagcaaactaaattcaacagcacatctaaaagttcattcgtagtgatcaagtgggattcatccttgagatgcaagaatggttccacatatacaattcaataaatttgacacataacattaacagaatgaaggccaaaaaccatctgatcatctcaatagatgaagaaaaatcatttgacaaaattcaatgtttctttattataaaaaccctaaacaaatcaggtataaaaagaatgtatctcaacacaataaggaccagaaatgacatacccacagctaacatcgtactgaatggggaaaaattgaaacctttctctctaaaaatctggaacaaggcaaggatgcccactttcaccacttctatttgacatggtactgaaatcctagccagagcaattagagaagagaaagaaatacagggcatccaaattggaaagaatgaagtcagattgttcttgtttgcagatgacatgatcttgtatatagaaaactctacagacgccatttaaaaatagctgttgggactaaaaaacaaatttagtaaaattgcaggatataaaatcaatatacaaaaaattagtggtggttctatagaccaagtgcaaactatctgaaaaagaaagaaatcaatcacgtttacaatagataaaaaaaatctaggaataaatataactaaggaagtgaaagacttctaccatgaaaactataaaacattgatgaaataaattgaagaggacactaacaaatggaaagatatctcatgttaatggattggaagaattaatattattaaaatggccatactactcaaagcaatctacagaatcagtgcaatacctatagaaataccaatgagattctttatagaaatagaaaaagcaatcctaaaatttgcaaggaaccacataaagtccctgaatagctaaagaatcttgagaaaaaagaacaaagctgcaggcattatactacctaactttaaaatatactacaaaagagtagtaaccaaacactgtggtaactgcatgaaaacagacacatagaccaatgaaagagaatagagaagctagaaatgaatccatgcttttataaccaactgatttttgacaaagatgtcaagaatacacattaggaaaaggacaatctcttcaggaaatggtactaggaaaactggatatctacatgtggaagaataaaactagacggttctctctcaccacttacaaaaattaactcaaaatggattaaagacttacacgtaagaacccaaattatgaaaccccgtctctactaaaaatacaaaaaattagccgggcgcggtggcgggcgcctgtagtcccagctactggggaggctgaggcaggagaatggcgtgaacccgggaagcggagcttgcagtgagcagagattgcgccactgcagtccgcagtccggcctgggcgacagagcgagactccgtctcaaaaaaaaaaaaaaaaaaaaaaagaacccaaattatgaaactgctatgagaaagcgtaggggaaacacttcatgacattggcctgaacaaggatttttttgaataagacctcaaaaagcacaggcaacaaaagcaaaaatagacaaatgggattacattaaactaaaaagcttctgcacagtgaaggaaacaatcgacagagtgaagagacaacctacaaaatgggagaagatattcactactatgcatctgacaaagggctaatatccagaagatacagttgaaccttgaaaaacatggatttgaactgcacaggcccacttacatgaggatttactaccacccctgagacagcaagaccaacccctcctctttctcttcctcctcagcctactcaatgaaaagatgataatgacctttatcatgatccacttccacttaatgaatagtaaatatattttcttgttcttaggatattcttaataatgttttctcttgcttactttattataagaatatataatgcaacatataatttacaaagtatgtggaaatcaactgtttatgttattggcaaggcttctcatcaacttgggctattagtagttaagtctttggagagtcagaagttatacacagattttcaactttgtcgggggttggtgcccccaaccccagcattgttcaaggttcaactgtataaagaactcaactcaatagaaaaaaaatctgattaaagaatgggcaagacatctgaatagctatttcctaaaagaagacatacaaatggctaacaggtacatgaataaatgttcgatgtcactaatcatcagggaaatgcacatcaaaaccataatgagtcatcatcttagcctggttttaatggctattatcaaaaagacaaaaaataacaaatactggcaaggatgtagagaaaggggagctcttatacactgttggtgggaacagtacagccattatggacaacagcatgtgggggggggtcctaaaaaataaaaaacggtagtatcatatgatccaacaattctagttctggatatatatcaaaagtaaatgaaattaatatgttgaggagatatcattgtgtatcattgcaatagtattacattgtgagagtgtgtgtgtgtgtcatttgtgacaacatggatgaacctaaaggacattatattatgcaaagtaagctaagcacagagagacaaatactgcatttctcactagtgtggaatctaagaaagttgacctcataaaagtagagagtagaatagtggttaccagagacagggagactagaggggcaggggatggggagaggttggtcaggggtgcagagtgagagttaggaggaataagttctggtgttctgttgcacagtaggatgactacagtcaataataatgtattttgttcttcaaaatagctagaagagaggattttggatgttctcaccacaaagaaataacaagtgtttgaggtcatggatatgctaattaccctgactttatcattaactaatgtgtgtatatattggaaatcacactataccttataaatatctattattatgtgtcaattaaaaataaaacattaaaaaacttcctaatgtacctgtcatataatgtaaatgtatataaaatgttttgatttgaactattagtattaaaattctgaaggtgatataggttggtgtcttatgtcgaaatttaactatatcaatgaattcatcagttttgtacttggaatataattatgaattacttgttttctaaatccagtaataaagtttaataatagtacatttccacactttaaatcatattactttgcataactaatatgcttgtgcaacaacatttattatctaacacaatctctgaggggcaggaatcttggagtgcttgcctgggtggttctggttcaaagtctgtcatgaggttggagtcaaacgctggggccagggaagccactactttctttctttttttttttttaaacttattttgagctctggggtacctgtgcagggtgtgcaggtttgttacataggtaaatgtgcgccatggtggtttgctgcacagatcaacccatcacctaggtattaagcccagcatccactagctattcttcctgatgctctccctcttcgttgacaggcctcagtgtgtgttgtaccctccatgtgtccatgtgttctcagtgttcagcttccacttaaaagtgagaacatgcagtgtttgtttttttgttcctgcgttagtttgctgaggataacaaaagccactgctttctaaaatggctcaacacatgtggttgtggacaggccttagttccttgtggctgtcctggtagtctcagtccctcacctcctaggccacaccagaggctgcctgagtgtcctcagaatggcagtttactcacatcagagtacagtggtgagagagagaaaacccaaaccagaagctgtagtctcttagaacctaaccttaaaaatgtcagaccacattctgttggacttagaaaccaaccctggtgcggtgtgggtggggagtggggagtacatgagggtgccaagtactaggaggtgtggattattgcaaactgtcctagggactgattgtcacaagaagtatttcattaggaaaaaatgtactaataatatgccaaagttttcatgaggaaatactgcccatattgtgacataaatattgcattttatataaaaaggtctggaccaaatcctctttctgcattgcacatggataggattggtgattttgttagattgagtttgtaggtttagatggcatttagtatatcagactgaaaaacagttcttaggatagaagaactagaagtactagattagaatgtccactgtgccacttctgaatctcagctttcttatctgtaaaataagactaacgtcagccttgtagactttgtaaaaatcctggcctgctaatggaaagtaaatgataggtcgtggaattagttcatgaatagtagacaaataaatgtttacttctcagaaacacttttttaaaaaggtacactaaaaataatttttagtactctgctataattcagaaaagaatgtcacataggattgccttttctaacttaataagtgaaaagaaaaccacattactaattactgaaaacaatatgaagctaatgagaagagcaaagactcgctagcttccaggttgaatatggaactaaaaactttttaaagggcatttgcaatagtaggggctaaaattctaaaacacattgagatatctggatattaaggaaaatgattttataaacctctagagcaaatttcaaaacgtaggataaaaggaatcaaatgtattaatggaaaagcaactgaacttaatttcgattcttttctatcattttttcctaggctagagatagactaaattcatatctgaaaattctcaatttttgagaaaagacaaaatgtttgtcgttacagttttgttgttgctgcccttagttgctttcattaccctcaaattctgtaacttgattaattttccaactcagagacctaacataatatgtcccttttgattcttgcacagttccatggttttctcttacctttctcaaagaagtggctttccttctactttttattgctaattaaaaaatacattcagaaaaattcacacaacacacaaatatagtttaaaagtaattattaaaaataattaccctactgtattcatttcttggggatgttgtaatgaagtgctgcaaactgggtggcttaaacagtgcagccttacgtcttttcattctggaggctagaattctgagatcaaggtgtcgggatcattaatcccttctgaatgctgtaagggggaaactgttccatgcctccctcttaccttcttctggaggtttgctggcaatctctagcactccttggcttcttgatgcctcatcccaatatctgccttcatcttcacatggtgtttttcctgtgtgtgtgtgtctgtaacacatttttcatttgtgtaagaacactggccatactggaatagaacccaccttaatgaccttcttttaacggcatttgcaaaacccctatttctaagtagggactgggggttagaacttcaacataccttttttgggagagcacagtccaacccatgacacctacccagggtgttattaccatttcagaaatgaccacctggaagtatggcactctctcttctctgtggcaattaagattggactttagtgaaaatgatttctgtgtctttcttttttcttttttttttttttgagacagggtcttgctgtgtcgcccatgctggagggcagtggcataatctcggctcactgcaacctctgcctcccaggttcaggcaattctcctgcctcagcctctggagtagctgggattacaggcatgcgccaccatgcctggctaatttttgtatttttagtagagatggggtttcaccatgttagccaggctggtctcgaattcctgacctcaagtgatccacctgccttggcctcccaaagtgctgggattacaggtgtgagccaccacgcctggcctgtgtttttctttatagtcttactacctgtgcatcatctctaaaataaagatagtttttaaggcatcttttaatgaaatggataagctttgaaaagcaggactgtaaattataagtcatttataatgttatcttcaattccctgagacaacctttattaaaaatgcctactttcataagtgaaaataaataactttaaaataatactgatagctttcagcaggcataatagtagaagtgatgttttgtgagctccattttggatcacattttaatttttttatgcttagatactacctcctcagttgaggactaatatccatatatagtatacttttccagaatgtgttttatttctgcaatgtattcatattgtaacaaaatccataatcatggtctccaaacggtttattactaagagctcaaattagcatgttccttctacatccattttgaaatattttaatctggtaaacagcatttattaagataggttaaagtcttgtcattctttattgagaagtgacagatatctattaaatcagtgggactctttttttttttttttttttttgagatggagtctcactcttcgaccaggcaggagtgcagtggcgcaatcttggctcactgcaagctccacctcctgggttcacgccattctcttgcctcagcctcccgagtagctgggactacaggcgctcgccaccacgcctggctaattctttgtatttttagtggagacagagtttcaccatgttagccaggatgggctcaatctcctgacctcatgatctgcccacctcagcctcccaaagtgctgggattacaggcgtgagccaccgcgcctggccatcagtgggactcttgatcagcctgagttatcctgtgtagtaaaacattgccggtacaatactcattaaaagcaaagaaacttgatgttttagtgaccctgttaagccttattaaggaatgaatgtaagatttagtttaaaaaatattgaaaataattcatgtctgttctatttttgaagattcataaaatcaagtttgctcaatataaaatacacacacatgcacatgcacacacaacttttgccaaattctgcagcataaaagactagttaaactaaattccttgaaatcacatttttgttttaattaaagtcttcagtgctgtaagtacagatggttgccaaatttaaaatgacccatgctgaatccagcaggttgcccctgctcacccattgctctccctcttattaaaatctttgctttgtctgctgtggaacctactgtaggaggggggaaaagagaaacactttgtcacagagtagatccttcatatttctttgttgaacaaaatacattttgttagaagagtcatcaagaaccgggagttcaggaactggaaatggatagaagtgatagaaggattggaataggatagtttaccctcagattccattcatttcaggattactcacaaaaaagcaccctctctcacacacacaatggacaaccgctactgtacctgaaatactcagctcattttaatggttagcacatatgctgtttttacaaggtagatactgctggaaggcattcttgcagattagtttggtcacattgccttctttcttatatctgaggtaaagagagttttgcattgactgttagggtggggaaaatgattttggtggtggtggggctttgtcatctagagaatgggaatggtgattaagatttgaataaaggcactttcagcttagtatctaagaaagagaagactctacataaaagagacattctaagcacacattcatctgtttggagattttgccttgagctaacaccaagcccaaacaaggagtggggtagtatggggtttttgtctcttattaatttttttaaaatttccttttcactgacttagtctttattctgggaatacatggtccattattctgccatgttaaggttaaacaggcatctggggctgatcagacacctaactacaatctaaaaagtcatttgtttgaaaacagtgttccaagtttcatctaaaaatgtactttcagaattttgttagtaagtttggaattgcttgtaaatgcaattctgtttatagttctatgagtatattttgattttttttttttttttttttaagacagagttttgctctgttgcccagggtggaatgcaatgatgctatcttggctcactgcaacctccccttcccgagttcaaacagttctccagcctcagcctcctgagtagctgggattacaggtgcatgctaccacgcccggataattttttgtatttttaatagagatggggtttagccatgttggccaggctggtctcaaactcctgagctcaagtgatctgcctgccacggcctcccagagtgctgggattacaggtgtaagccaccatgcctggccatattttgaattttgaatgtcatttctatcacaaggaagcctagtttaagtaactatttcaagggctgacatctgaaataggccataaggcataactttagtgaatatattttcattttctgtataaaactatattttctagaaacgatttgaagtcaagaactgtattaaatggatttctgttcctttgatatataggatattgccttgcacacagtaagtggtcagttaataatgaggaattagtacatgaatggctctacagagtgtagaaagagaaccttccagaggtcatttacatgaggagaactgtgagtttgattactgtcatctaagtgacaaaagaagttattctttattatcaattcattcataaatatttagttgaacacttaagattgctagtcactgtgctgagtgctctgtgaggaaggaagatgaatgaaacagaaactccatcctcaaggagtttgctttccattggaaaaatggtgataataataacacacaaaaacatgaagatggccacagctaagttacagataatgcttttgtagttcagcagagtgtaaggatagttgaggtgtttggtgatatctgaatttgaatttggaaatgtgatgaaggaaaagaaggtatgtaccagcaagggctgctttccactgcagataatcagaaaaattggccagtagtagcttaaacaaagattagttatttttttttcaaataattagaagtatagaggtgggtgactgttgacattggtttaacaaccaaacaaagacagagctaatgtctctgttggttctcttagtctctttcacatggatacctcagctctatcatgtctgctctcaaggcaggaagggtgagggtacctggaggtccagccactttcttactttttatcagaaaagcaaagtctttctcagaagccccaagctgacttctctttacatctcattggtcagaacagagccacatgcctacctttaattatcatggtagcatccagactatactagaaaggtctaaaaatatcagtatcaaacaaaaacaaatcacaagcagaaaagaacaaatgaaaggtttttctttattgttactactgagaataaatatagagtatctgattaataaagtagtctgtcagaatttagtgggtaatcaatcatgatctttagatttgtctatattagtggatgctattagttgaatagttttacagagtaccatactagtgaaagtgtgacataaaagtctacaacaagcacttgaatgattaaagactcctttaatcatagagatggatatctgaatagagaacctgtcacttacagatcaagtcttttaatactaccagcacagagaacttgcattaacagttggctgatttcttgtctccatttgagaaagtatggttgttttttttctttgtctgcccttctattccttccctccctccctccctgcctccgtcactccctgcctccttccctttttagactgagtctcactctattgcccaggctggagtgcactggcaccattatagctcactgtagccttgaacttctggactcaagcagtcctcctgcctcagcctcctgaatagcatgagccatcacagatgtgaactactgtgcctgactcctttcagtttctagaagggacttgtttctgttattcctttcaaatggtcattgtcacctttgttgatgttgccaacaaaggagatttataaggaaacatctttgctatctttaaatcattagaccagtgtgattgagcaaaagttgctcacagtttttttaattaatcttacatcagttttgaatacatgttttagtagaggaatatgaagtgctttatagtccaacagatcatgaaggattgatagctctggtagttaataaaacaaaacaaaacaacagcaacaaacagctctgcatgttttacagcatttctacctcttaaaggtaattttcttccttggtaatttgtgattgttggtggtgaggggcgtgtgtgtgtgtgtgtgtgtgtgtgtgtgtgtgtgtgagagagagagagtttgcagacacgcatgcattttacctgaaccaccctaaccttagactttttcttcctctggcctccttggggaccacaactatgacagagcaaagacaatcagctccttgtgattgttatacatcagtggcttttaaacatgagtgtgtgtgaaaatccttcagggagcttgataaacatgaagtcttacaggcctgctgatttattaagtcgggcaagagtggagattgggaatctaaaggtactccaaacaattctgttgcaggtgacccctggactccactttaagaagcactcctgcagccagtgagcgaggtggtggggacagttaggaagacggctctcgcactaggcctcagtgtgtctcacctcctctggtctctgaaatctgaggtctctgaagtgcgttgtgaatactccaggtggtttgtagggagactcattttgattcagaaaggaaataatgaaacttctgtttatatttatttttgactttgccatgtaaaatttattttttatttgtgttttgtcacacacatgctgtatcagtacagttttatatattcgtactttagaaatggagtggtacacatgtattagaggcctgttctagaaaatgtcttactgatagcggtgcatgatcaaagaagtttggaggacgctgctttaaacgatttacaaggccaaaatccatatctctttccagctgtctgcaagagtttattgttccttagttgtttttcatttaggtatcaacattagccagtgcttcttttactactgtatgcatacacacagagcacagcaaaagattgaggacaaaaagagtttgcaattaaaggcaagtagaagtatctgtgtgctaaggttagttatctgacttaacacctttatttgaacaaactcctactgagaaatcagaagaatcaaggtaacttcagtctctcaggttctggccctcgcttcagctgtgaatagacttaccttctagtaacggtgactcagtggcccaaaagtggatataaataaatgtggattttctagagagtttactcattctctgtctttaaaacttgatttaataaacccttctgttcacacaggaccctttcctataaagtattatctggtcaaggtaacacacacacacacacacacatacacacacacgtttttaacggcataacattatttttaaaagatacttttagattgcaacaactaaaaacactgatttgtcactataattatgaatatagtcccataggtaaactttcattttccgtattttggagctggcatcaagactttgcctactcatattttttattatttaaaatagtctataggatccaaagatgccatgtctttttatctaggttcttctagtcagtatttctggacataaggccgttattacctttctacgagttttgtctctgacacgcacacacacacacacacacacacacccctaatctatttatttaatggaattgtaaataaaggagaaaaagcacatgtgcaatttctggtttaaggctgggcatagtggctcacccttataatcccagcactttgaggggctgaggtgggtggatttcttgagcccaggagtttgagatcaatctgggcaacatagaaagaccgtgtctctactgaaaacaaaaaaattaactgggcatggtggtgtgcatctatagtcccagctgttcaggaggtggaggcgggaggatcacttgagcccaggaggttgaggctgcagtgaaccgtgattgcaccactgcgctccagcctgggtgacagcaagacactgtctctaagtaaataaataaatttctcatttgaaaaacttcagcagtttctctcaatattgttaatattttagtagccacatagcacaagcagtgtctgaagatctgaaatctattttggtttcttattttaaaaatcatcttttaatgctatttattactgatatttatcagcattattgttgcataggtctgggtaatttgaagaggaccggcaaagttggacttaaaatgataataaatatagctactactaataatattgattgagcctacatgtgcgtgacactgtgcaagccagtttattatctcatttaatccttgcaataaccctgtgaggcaagtgctctcattattatttcactttacaaatgaggaagtgaagatgtgggggggtgagaaaacttgccttcagtcactcagctagtaagctggagaagaggcaggactccaaatatcaagggtctagtttttagctatgtgtatgtattctgcttcttagtatctgcctttctgctgtgactggagggttggctcatttgtaagattgggagttgggatggggacagacctctttggggaaaacaaacacagcctaccctaccccaaaggagaagcccaaacacaactgggagaagggccatccacatacaactcagagagcatcatttcacttgtattttgcgtgaatagagtcctccagagttctgcaaaatggtagtactggctgggaacttctgtcttgagcacagcaagctggaaggggttatggggtttgtgtatttataaatattagcagttttttttttgtggattggggagctaggaagctaggtggaaggagggccatctagactctttggaggaaactgggtctctgtcacttgtggggctcactaggtgtctaggttccattctctccaaaacgttttattttcactgaggaaactgttttcagtcctttgatccaagattattagtatttctgcatctcagtttactcctttcagaaatggaaatgatcattgctttgtgtattagagaaacactgaatggattggcgagaaaggtcttcaagtggttggttgctctctcccttatgacagtgtcagataatgactacttgcagtttcaggctgatattttccttcgtctctaaggtgacaccctttgaagatgtcttaggtgtgatgtttttagagtcgagaggtcaggaatctcatctgtctgcttgtgtttgtatctcccatatctgggacatcgtaagggctcaaaaaataactgttgagtaatttaaagttgctcaaccattgtgagcctcagttttccttatctataaaatggggataatagtgtgaatctcatagtattcttaagaggattaaattgtataacatgttaaagagcttagtgcagtacctgccacactggaggtatacaagaaatgctttattttaatagttattattctgattattgtgttttatctttaaaagataactcttgactctgctgcttaaaacctctatgccttcaaacaaattgagctctctgggtcttattatataaaatagggctattactactacctacttcactgattgctgtaaaatttaaataagatttagaatttacagttacttagtgtgtattctatgcaccactgaattagacacactatctcatttaataattggaaaaaatcctttgtggtaggtagcagtattctcattttacaatttcaaacaccaggtctcggggaatgaaggtatcagtgtaaggtcacatcggtagtaatagcaagtgtctgtctgaagccactgttctgtactttacaaactctaagtccatttaaaagggccatacacatatgtgggccatgattgtagcatctctttctttgggcctgagggctgcaatatagtagagtccttatttgccctgttgagggatttaaatgcatcatattacaatgaatatttaaagaaagaacattttcccaaacttctctttggttttgaaattttcactttttttcttgtaatgatcagtctaaaaatactgaattctgtatttccaagatcacaaaggagtaaaaccacttggccaaagtttgaaattaggttatttttgtgttacattgcccattttgtgggtcttgaagtggttattaagtaaaatcagctacaaaactgggaggtcacttagttttaggattatgtcaattgacttgtcaaaaacttttgttgcgaagaaaagaaatgacattattatgaattctaaagcagctagatagacttcctatgagtgttaaaattttgccagagaatcatgattttgaacatatcacatatccagaccggggagctaaaactaactagtacatttcctcttgtgtgtcttaattaaaaactaatgtaagaaacaagaagaattggttcctaccttgaaatgttgtttcccagacagatctttccttcctggaagtcattccaaagttgtttggggtgtcaggttcagaggtaattgaatttttctgtctagtgaaaagaggtggctctcttattttggtcggttgttcccagggttttgagctttgaaaaggtttgacttagaaaccatgaggtactaacgcactacatttttgaattactattgattgacatgtctctgttcaatgtaaacagcttaaacagagagtgcagttatagaaatggaatttgcatgagaaccttctcctgtatgatgtaatgattgtttcatattaatcaaaataacaaaaggggatattaatttttttgtaatgagctgtaaattagaatattgaatttggaataattaaattatactttacttatgtttttcttcttggacgctaccattttaaaaaacatacagttcatgtgaaagtctgaataaaattcatggagtagcatcaaggacctctgagtccaggaaactgagtttggcagtactaatttgtattaaagttgttgttgcatgacagccggaagaagatttaatgcttgccacctgaatcaagtcacggaacattggtttctataactgccatgaatttgaatcgaggccagtatctctaaatttgaaataaactgatactctgtcttgaaagatgatacaggccacttatgttgtataaggtatttagaaaagagtatttcagtttaattttttagctatatatacacccacacacgcatacacacacacatacacacacacacatatatctttcaaattgttagactcctcagcactgtgacctccagtggttcttgctgttagaggctcacacagaagaactcggaaatgcctgcagccatttattatccactttcagccaggagttagcagtgagtttgcacctggttccaggtttggcatttctcctcataccatggaggagctgctcacttcatcagaaagtcattatccctcttggatgtcactatggttcaaagtattacagtattgctttaggaatttagattttaacccagccaccagatgcaaaatccattcacatgcctagcacaataaaaatgatgatgatgacaataattcatattttgcatttgcaaaaacatctttcatctgaagggcttttgtaaatggaacatgcatcttgagactactttatagacagtgatctttgagtccaatatagaaatgaaatgaatctacctctggagtaaaatatggtagccatttaattattttttaacaagctacgtattaagcacagttgtatctttatgcaataaatgttttgctgaggaactttatcaattatatttcacattaaaatgttcagactttatttttattcttactaaaaaataacatgttcttttgattagaaaaatactcagaaagttgactatttaaaaataaatctctgttgagtctttttgtcaagccgaaaaagattccttaatgtatcacatagatgtgtctcgagttttcttacggcagcacaagtcctgcttcatcttggggtggtgtggagcggggggtgagaggaactccaacagcatactatcttgatggacagaaccaatgcacactcaactcttaattgcacaaatggaaataatccaggccgttttcttttccctttaggcttccttgctagatgatctcatccactcttagggtgtcaaatagcagctctgctgatggcccattccttttcatctcttcttcccatttcttgccttattttctgcttaatctttcaaactgtctgatgaactcctctctcaagatatcttaccaggaactctgtcttagttttatgttgctatagcagaataccacagactgggtaatctataaagaagagaaatttaattctcatactcctggagtctggaaagtccaatatcaaggtgctggcatttcatgagggacttctttacggcgtgatttcatgatagaagatggaagggcaagagagcttgagagaagaagagatcaaacttgcagtttcataccctttaataatcagcattaatccattcttgaagatggagccctgatggcctaaacacctcctattaggccccacctcccaacactgttgtactggggattaagtttccaacacatgcattttgtgaaacatgttcaaaccatagcattttcaaattccaaaataagatatcccttacaatagtatcttaccaaacacagtggctcatgcctgtaatcccagcacttagggaggcagaggcaggaggattgcttgagcccaggagtttgagaccaacctgggcaacatagtgagatctcatctctacgaaaagaaaaaaaaaatctctatctgcactacttaaatgactgaccttttagtccatgctcttacttctgttataaatgttcaagacttgagacaacttcttccttctcaaattcaattagttcctaaattcaatacacttatcttcagcatggtcccttgcatctgtccactgcattatatgaaccagtcaataggcattttattgctaactgtaggataaaggaacagaaggaaggtaaaacccgtatcactcaatttccccggttgctaatatcactcagatggtggaggcggagttaaaactattggccaaaataaagctgtaggtaacttgcagttttgcttattgttctgtaatgataggaataatttaaaagtttgaggctacagcagaaatgaagtgtgtctgatttggccagttgtaacagtttatagcatggcatgcaattataagttatcttaagtgaagatgaaaggaaaaaaaagtttgttaggtataattagagaagaaaaacctatttcaatactaaaaactgtagatgtttgagtagcatattgccatcatacaaaggtatcaaggggtattttcaccgccttcaactagtaataataatgaatatatgccccattaaagactattttaaaaaaatcttcaagttctgtctttattagagtattttgtagggtttacatccctgaaaaatatgtccttgtgaaattttgtatttttctttagactataaaaattctcccacttcttacttcaccaaattgtgtatgtgtgcatgcatatgtatatgcatgctttatattgatggaatgatttagtacattaaataacctgtttacattcccactattcagggcagggcactcacttgtattaaattatttatttttgagataaacactttcatctgtcattgtaggtttccactcatttttgttcctctaacaataatattaagtgcaaaatttccctttatagatgaaaaaataatatacaccagtattcattctaaaagtttttgccaaacagtataaatttaaatctttggctgaaactgtgtgatttgtgtggtttcccttccgtgtcaataatggctatatattagtgatgctgcactatattcatgcaatttataacacatatttaatgaaatagaattattattattattatatattttttaaatggagtcttgctctttcacccaggctgtagtgcagtggcatgatcttggctcattgcaacttccacctcccagattcaagcaattctcctgcctcaacctcctgagtagctgggactacaggcatgtgccaccaagcctgactaatttttgtgtgtttagtagagatggggttttgccatgttggccaggctggtctcgaactcctgacctcgagtgatctgcccaccttggcctcccaaagtgctgggattacaggtgtgaggcactgcacccggccaaatagaattattaagtattgtacagaaaaacttatttagaagagaagtcatttaatacagtgtggtaaagtgaagtttaactgactagattcagtatatgtaacacattatatggtttcccatgttgtgaaagagagttgccaatctttagatgcaaccctgacctgttatagtgcctcaatcttattttgtttggttttaatccctgctgtatcttagaattttgtatggagttagaagcagagcaagggttttttctccagctgttcttcaaggatcttccacttagattggagcaatgtgcttatataaatcttgccacatttttagtgcttctgtaaggtgaaaatgctcaaatagggttacgtaaatacaaacttactttgggaaaaaaagtaagagggaaagagatgaactgtaacagagatctggtttttcatcaacattttgttttatgagtctttggagatgtggctaagttgagtaactaaatacttatgcttcagttctctataagcctttcttgtgctgtattttgaatggaaataattttaaagcagttttttctttggtattcacaaaattctttccaacaacattatcagtgaattggatgacattgagatagcaggaatactattgtgtttgtatgtgttttttagagatggaaactccttaaaaaaacacagtggaaccgaaataatgtctttattgttcattcttaacagaagctccattttcttttgtagggtggaaatggttgactttaattatccttagtcatgtgaatattctgtgaatttttgccctgtcttctaaaagagtttgtgggggaatggccaccaagtctacagctccagtgtagtcattcctgtgttctaaaagctcagtatttgatttaattgctaaggacaattgcatcagtggggatttttctgacttgatatctatgttgcaaactaattaagtcctgggtataatgtgcataaaaatatacataatttgagagccaaattatatgtattctttcatactgggagttctttaaattgtggtaatgattatttgttgatattcatgggggccatatgatatggacatcagaacattgtctcagcttgatgtgcttatagtcagataacaaggaattcatatatattgatacagaaaatggtaaacaaagaaagtaatcctaccaatgggcttggtgactgtggtctttatgtatgctggtgtctcatttttaatttaggtagggctcgtgtgtgttgaaggagagaggtgcagctacacaatttagaggctatggaacatttttgaaaagtcagaaatctatagtacacaaaaattttaattatccaaataacacagggaggggacctttggttattaaaatactcagccttgttgttaggctattctcttgcaaatgggaacttttagtgtttcaagaattaatatttctgcttgttttctgtaaataatttatctaatgccaaaaatacatgtctagtaaagaaatttagctccttttggaattttcagtgcagacttactagggaagatttttcttaatgtatgccagctaggtattatgtttaaaaaacaaaacaaaacacaaaaatcaacaaactcataagaaaagatacaccatggaagggaaaagaaagcagaaaaaaagatttcaggcctgtaggagtgcaaagagttgatttctgtatttaacaaggatgtttaggattcacattctcaacatggatggcagcagcctgattctccataatgcaaggaaatagcttagaagaagctataaagttctgtcatgtcatggcttggtgagcgaggatggatttacacgatcaaggatataaatggctttgagtgagtcgttagtcataaggtccacgattcttcataattgacatggcttccccgtgtcattcagacagacagcagtaaggacatggggctgcagccattgtcactacagccctgagagtccacatgggcgccgctgtgaggattctgaactctccgtgcaggagaacactgtgtgcctcttgaaccgtctgtgtgcagctgtggttttggatgtgttgcatcattttagaaatcatggctggggctctagctttaagtttctcactctgatttgtatgatttagaggagagaatatgaaaactggttccatttccctccaagtgtgacctgtgttcacactttagcttgtgttttgagaacagggtgggaatgttctcatgtcattcattatgattcagcgtattttaatgaggagaaagggaagtatagtctctttaatttaaaatattttggatagtctactgggtgccttccttccaaggaaccatggacattttgacacattctgaaagagttggacacagctgatttcctttgactatcaggaaaagtatggagaaggagaaagggaaacctctgtgtgcatgggtttttgtgtgttgatgtcagtggggagggtgaggttttgattccattactatatgtcaagtatgttttaaaatgtgacctaaatctaaaggcaatgctaactccaatcaaagacttttctattaaaatttaaagttattttcggtgtctcattctacatttttaatagtggcataattgtaaaaattattttgaaggttagtggtagtagttaaaaaagttagcagttccactgcataacatttagttaacagcagcgttgtagctttgattgagctgggctgtgggaatgcaggtctttagctaaggatggatatgattttactttattttttttaaggtggagaaatgaatgaggcatgcattcatgtttttcacctaggccaaatggaagacttttcagtgatgtaacccattaggctggagaagcttttctgtggcgctgccccgcggtgctgagaataagttatgaatgctgcactgttttcagtgcagagggctttgccgggaagagagcggtgtgcctgggccccagctattgagaagatgccagtcagggatgaaaacgtctttcatgaaactatagctaacttccctgtgacacattaccatagagcagagagtatttttaaaccaatagtgtgaaaataagcacaataccttataaaagtcggaaggctttattttaaagtatgcacattgagtgactaaaaatacacaagtttgtgtcagaattttttttttttttttttagtgaattggtcttagcaatttcccttctctccctctctctccctgttcacagctctgatttcttttgccttttggttacaactacaaaagatgtcttctgagacaaatgctggtccatgacatcaggatgaaggaatgctcagcccagtcctgcatgtttgaaagcatcagctgcttgaaaaaaatgttacattttccaggatggattaaaaaattaaggatgatccctgaaagcagttagtttcagacctttacacaagttttcttattttttatttccagtgattagaaagataccaacattggaattggattttgaaaattagtaatatagcatttttcttgaaatagaaaatgtgctgtggtctttataaaacaaatgataataattgatgacagtaacaacaattggacagcatacaattatatattctataaaaattacaaacttaaaagtgtaaattttaaagaccaaatctttgcttttattttagacagtataattttatgaatttacaagacttacattaaattattgtatgtaaaaaatactttaaatttctttttactcttcttagctattaccatgacttaatttggagcatttccatgaaatttcttatacttggattaagtacatactaattaaaataacaactaaacattctgtcatgtttcaacatatgaaagaggcatgctgcttttatttcctttttaactattggtatccttataaagttaattattgttattaatttcccctcctgattctacatcaataggagaaaatggaagttctagaaaacattttaacaataacaatttcaataaaatatatcaaaatgccaatatgtaaaatattcaaataagatttaagaaaacattgatttggtgatttgttgcctatatatttaagaatcataatgtctgagtatggcaattctccattaaattatggtttaaagtcttaatcatgatataatagatggtaatcttgtaactgaaaaaatgattatttttgccctctaagactgtgttttttgtatgtccacagcagacttatgtcaaaggaaaaggacagttttctttaatcttttatcttctcagtaaaactaaattataaaaagtaattcctttggtatacgatagtagtttagaaacagacacatcctatacattaaaatgaaaacattttctccattaaaatgaaaatttaaaaaaagattgattaaaatgtaataatgaataggaaaccgattaatctaaaaacatgtttaggattcaagctttcaactggtctgttgttatatgagagaaaagagaaaatcttgtatttatacaatacctttttttatgaggaccctggaggttgaatctggttttataacaccaatggggtgtgtcatctttgagtctcactagccacagtggcaactaagtagactggacacatgttcttttgtcctcacagtcatacactgatgtcacttgactaatgttctccaaaacttctctagggcttacttaatctctccaatacttaatttataccccttaagaagaccttccaatttatacttttctctaaatttatttattctatatctccaattatgtaacccatggcacaacttctgtagaatcttccctatcatctagtcactcagtgcgtatttattgagtaccactataccacagccactaagcagggtggtggagatcacagatgagctagacatggtatctgccatctaggatctcccagtctgagtgtggggaggaacaggaatggaggcagaaatatgtgcaaagcaacagttgcaactagtgtgatgaatgctgtggaagaggtaggtagaggatattctggtggcatagagctgggctaccagttgcactgtggaggctcaggagtggatgtcaagagcaaggaaccctttaagtcttgaagaatgaggaagaactaagcaggtagataaagtggagaaggacattccaggcacagaggcagaaataccatagggaaatctatacaggctgttgtgactggacagaggtagtcctatacaggaaatgaggttgaaaagctatattttgagaagttattaaaagtttgtggccgggcacggtggctcacgcctgtaatcccagcactttgggaggccgaggcgggcggatcacgaggtcaggagatcgagaccatcctggctaacacggtgaaaccccgtctctactaaaaatacaaaaaattagccgggcgaggtggcgggcgcctgtagtcccagctacgcggcaggctgaggcaggagaatggcgtgaaccccagggggcggagcctgcagtgagccgagagcccgccactgcactccagcctgggcgacagcgagactcggtctcaaacaacaacaacaacaacaacaacaacaaaacaaaacaaaaaaaaccttgtattctatgcaatgaattttgaccattattttctacttcctatcacaatacctgtgaattgaattaagctgaaacaaatacaaagatcagcttgggagtgagctagttagatttgaatttcagaaagatgactctggtagtgatgtggaggagagaggaaggaggtgagattcacggaaggagatatcagtgtgaagctcttgcagttattccaggcaagacttggtgcccccattgaaagcagtgtgaataggggtggacttgataaattataggaggcaaatctacacaaactaattagtgaatggatatgaggggtgaggataaaggagggagtcacgataagcaaaggttgggttctactcagtacactgtgtttctattccctgaaacagggaatgtaggaaaaggagcaaatatgtgccagaagatcatgagtcctattttggatgctttgagaccaatgtcttccatgaaaacgtgaaatggcagaaacccagatatttgcagactaatccagaatatgaaaataatggaatgtatttgataagcaagtgcttattgaatgattgaatgtgtgtgattagccttcaattcattacattttaaatgactattattgacttgctatgattattttaaaatcatacagcacaacaggaagcattctaattattataaaagtgaaaagataagtggcacaaacaactctttttgtggctttaaattttccagataggttgatgtgactatacataactctatacttaaagttgattaatctagatgctaccattattcctccttccctcattgcccatttttttgaatgttttagtaataatggaaggctaccagtgggcaaatccagtaggtagaggaataactggaagagaaatgaccaatcaaaaacttgaaaactaggagtaagtacagattttaaaaagtcaggccaggtacggtagttcacacctataatccaagcactttgggaggctaaggcaggagcattgcttgagttcaggagtttgagactagcctgggcaacagagtgagactctgtgtctacaaaaaaatttaaaaaataatcaggcatggtagcgcacgccggtagtcccagctacttgggaggctgaagtgggaggatcacttgatcccaggaggttgaggctgcagtgagctatgatcatgccactgcactccagcttgggtaacagagatgccatctcaaaaacaaaaacaaaaacaaaaaaaaacaagccactgattggaggattaatccatttgtcaaagtttgttcttggtgaagtgtattactggaggcttatcaggatcaatgagatagatacaggatagttatatacagtcctgggctcaagtgaccctcctgcttcagccttccaagtagctgggactacagacaagtgttaccatgcctgattaattttttaatttttttttttgtagacacggggtctcactatgttgcccaggctagtctcaaactcctgctttatgttcttgatggttccccagaaagcctttctaggtgttggggctataatttcagcagaatcaagtcccatgtaaaatgtaatctggacatgaagggtaatgtcccctaagactaccttagaagtcttcactctggagaatgaagattctcaagggatacctggccctttggtaaaacgcagcattgatgtctttagctttctgtccattggccatagtttgcccaataacactagtggcctttgtcattgaagctgtacaaggtagtggtctcctggatctctcatttatatccttgtaatggcagtggagataaaatgtaggtagaattcttccccctggctctccaaaacaatacaaataacacatgtaattcatttaatgactagataacaatgaatatcagtgacagttattttactgtccgtctcttaatttgcatcatttagatcataacccatgattagtttaaagcgatttggattataaatgctatcccatactttcaacatttgaaaatatcattcagggttggttaaaaaaatatgattgcacctccctttgggcctcacagtaaggcattcgttgccttggtaatttgactgtgtctggtgtagggtctgtcactcagctttgccaactcagaagtctgatgttgtcagcactcagagggcagatccgtctctctcgggtgaactcacattaactacattcatgaggctaataaaaccagaatgccaaattattcgcttaccattagaaatacaatcacacagatggaatgcttgtcttagcaagactcaaacattctttttcaaaatgaagagccagattacacttagaaggggcccagtgagcctggagtcagaatgggggagttggaggaatcaaactgtgatggcctgatgctgccatctgcacatggactggtcagtaaactggactcctaaaagtctgttaaccaaagctgctcctccatggagaatggtagggaagggcacatcccacatttgtgtctgttgctctcattttctaggtggtacctgtggttaatgaatatgttttctaccatattatttctttaggtcattaggtagtaaattttgatggtttggaagccattctgttttcttaagatgactttgcctatttctgttccgatatgttctagttatggtagaaatttcataggtatttaatttccaggtatttggggtaggcactgcctagcacccaggtacaggtagtgtctagacctgaggtagtggggcatgagcaactaaggctgattctctgcttgtccctggcctagaaaccacacttgtcctagagcctggcataaggctgaatgacaggtaagttgctgtagttattgatgttttggaagtgtaggagaaagtaagtaatcagggagtatagtgaccatattttctgaggtaaaaagacacaagctagcttatatcttcatgtgaagatactaaatattacccttattgaaaacattataggaaacatacataaactcatgattaaatttagaatggagagaattgagtcaaagatgactccaaagttttacgtaacaagaagaatggtaatatgaatagtcaaaataggaagaccgtgatatggagctggtttggcaaggaaaattatggtctctcggcagggtgtggtggctcacgcttgtaatcccagcactttgggaggccaaggcaggtgaatcacctgaggtcagaagttcaagaccagactggccaacatggtgaaaccctgtctctactaaaaatacaaaaaattagctgggtgtggtctcaggcacctgttgctacttgggaggctgaggcaggagaatatcttgaacccgggcagtggaggttgcagtgagcctagattgtaccattgcactccacctgggcaacaagagtgaaacttcgtctcaaaaaaaaaaaaaaaagggaaaatggtggtctcttgagactatgctgcatttgattgatgttgctgttaaagtaaaaatgtccatgggcccttaaagcaagaacgggagctgtgtgaggacagggataaatatgtaggtttgggactgaccacttttagaggtttgggagtaggaagaacaggagactccaggaaggaaatatgaaataaacttttaaggaggcagttgaaagcaggggcaggaaatcctaagaggtgagacattcgagagggaaatataatcaaatacaatcaaattccttcctttgtgtagggacagaagatctaaggtggtgagaaattgaggagaaaattataagcaaatgcgcaaagtgaaaagaagattttagacctagaaatgaccactgaatttgatgacagtgtcatatatggcaaaagattcatttattaatattaaccattttgtatttttatattcaaataactaagggttgttttccatttgtcaggcagaagtgctgggctttactgacagattatggtttttatttcccacagtaaattaagcattctttccaatgaatttttatggaaattgattttaattttgaatgaaggtgaagttagtttaagaaaatggaaaaaaaataagatattgttaccttttaaaagaccgatatatcttcatggttctgtagatatagtcaaattttgatcaataaaatggtagcatgaaaatctttccaggtctttttggcactctcacatgctcagtttaataaagcacttttgtttacataaacaggatcttagcttatctagcctggaaggaatttgaagaggaggatttttaagtcaaattaattaccttctgccccagggaaagggaaccaataaatatgcagagatatcatcctttgagttttgtaggttaaaaggtgatagagcagctggtgttttctgggggagctggaggaagggggtatagatgatggactgtgataggaagttatttgttactttgtttgaaatactatattataaattccatgaatactttaaatgtgcaagtgtgcttaatgtacactattgagaacaaaatgtaaatggtttgggcattctatggtacttcactgttctgttacagtgaatacttgccaactgacttcctgtatattaaattaatatcctgttaacaaaaattatgacaagtgaatactacttatacttctgtcatttcagcaaaagacagaaataatatatcaaaatgaaaataacatactgaacttttgtaaattttagattagagccccaaatttttttttcatgatggatgttaatttaaatgaataaaaatgattttatgtaaagagaagctaatctttgatgcaggttgcaagataactgcttgctactgggaacttaaattaaaaaaaaaaattggataggctcgccattctagttttttgtttgtttgtttgtttttgtttttttttttttgagacagagtctcactccattgcttaggctgtagtgcagtggcatgatctcagctcactgtaacctccacctcccaggttcaagcaattctcctgccttggcctcccaagtagctgggattacaggcatgtgccaccatactcagctaatttttgtattttcagtagagatgggatttcgccatgttggccaggctggtctcgaactcctgacctcaggtgatccacccgccttggccttccaaagtgctgggattacaggcatgagccactgcacccagcccattctagtatttctattttaaatatttaagcactttgagttccttgaatcaagattctgtctttggagcaattgttatttcactaaagaaacaagtggctctcgggaaatgttataaagaagacaggaaagaaagaggactgttttagtaggaaactgaagctgggcagctcagcacagaaaaaggaatatgggctcaaaccctcatccgttgaccagaattcttgatgacccattggacatctttagtggataattcagctcttccaaatcagcccatccaactccctcccttcagtagggatttatccttcttgttctgtaacctagttaatggtcaaaccatccatccagttacttaagccagaagcctgggaatcgtgtttggctcttccttacatggtatttctgcctcctatttgccccatcattgtgcctacttctctgattcccaccatggtagtcctggctgaggccctctcatctttcttccagataaccagaacagcttcttaactgccttgttcattccatgggatggcctctttaaaagcttccactggtggaaatgtgatatggtttggttctgtgtccccacccaaatctcatcttgtaagtctcacaattcccatgtattgtgggagatgatttaaacatgggggcaggtctttgccatgctgttcttgtgatagcaaatgagtctcacaggatctgatggttttaaaagtgggagtttctctgtacaggctttctcttttcctgctgccatccatgtaagatgtgacttgctcctccttgccttctatcatgattgtgaggcttctccagccatgtggaactgtgagttctccattaaacctctttcctttgtaaattgtccagtcgggtatatctttatcagcagtgtgaaaatggactaatacagtaaattggtaccagtagagtggggtgttgctgaaaagatacctgaaattgtggaagtgactttggagctgggtaacaggcagaacaatttggagggctcagaagaagacaggaaaatgtgggaaagtttggaacttcctagagacttgttaaatggctttgatcaaaagcctgatagcaatatgtacaattaaggtccaggctgaggtggtctcaaatggagatgaggaactttttgggaactggagcaaaggtgactcttgttatgttttagcaaagagactggtggcattttgcccctgccctagaggtttgtaatttgaacttgaaggagatgatttagggtatctagcagaagaaatttctaagcagaaagcattcaataggtgacttgggtgcttttaaatgcattcagttttataaggaaaaaagagtataaaagttcagaaaatttgcaactggataatgtgatagaagagaaaatcccattttctgaggagaaattcaagctggctgcagaaatttgcataaataacgaggaacaaaatgttaatcccaagacaatggggaaaatgtatctagggcatgtcagaacccttcacagcagcccatcccatcacaggcccagaggcctaggaggaaaaactggttttgtgagccgggccccgggtccctgtgctgtgtgcagccttgggatgtggtgccctgtatcccagccactcccacagtggctgaaaggggccagtgtagagctcaggccatggcttcagagggtgcaagcctcaagccttggcagcttgcatgtggtgttgagcctgccagtccacagaagtcaagaattgaggtttgggaatctccatctagatttcagaggatatatggaaatgccttgaagtccaggcagaagtttgctgcaggggcagagttctcatggagaacctctgctagggcagtgggtatgggaaatgtggggtcggggctcccacacagagttgatactagggcactgcctaatggagctttgaggagagggccaccatcctccagacgccggaatggtagatccaccaacagcttgcaccgtgtatcgggaaaagccacagacactcaatgccagcccatgaaagcagctaggagggaggctgtaccctgcaaagcaacaggggtggagttgcccaagaccatgggaacccacctcatgcattagcatgacctggatgtgagacatggagtcaaaggagatcattttggagctgttagatttgactgccctgctggatttcagacgtgcatggggcctgtagcccctttgttttggccaatttctcccatttggaatagctgtatttacctagtgcctgtacctccattgtttctaggaagtaactaacttgcttttgattttacaggcttgtaggtggaatgggcttgccttgtctcagatgagactttggactgtggacttttgagttaatgctgaaatgagttgagactttgggggactattgggaaggcatgattggttttgaaatgtgaagataggagatttgggagggaccggggtgaaatgatatggtttcgtcctgtgtccctcacccaagtctcatgttgcaagtcccacaattcccacgtattgttagaggtgattgaataatgggggtgggtctttcctgtgctgttcttgggatagtgaatgggtctcatgagatctgatggttttaaaaacgggagtttctctgcacaagctctctcttttcctgctgccatccatgtaagatgtgactggcggctgggcgcagtggctcacgcctgtaatcccagcactttgggaggccgagttgggtggatcacgaggtcaggagatggagaccatcctggctaacacggtgaaaccccgtctctactaaaaaaaaaaaaaaaaaaagatgtgacttgctcctccttgccttccaccatgattgtgaggcttccctggccacgtggaactgtgagttctccattaaacctctttcctttgtaaattccctagtctcgcgtatgtctttatcagcagcatgaaagcaaactagttcaaaatgtaaagtagttcagccactatggaaaacagttctgtggtttgtcaaaaagttaaacatagaattaccttcgtacccagaaattccacttcttggtatatacccgaaatatttgaaaatgggtactcaaataagaacatgctcatgcatgttcatagcagcactgtttacaatagccacaaggcaaaaacagcccaaatgctcatcaacagatgattagaaaaagaaattgtgttataaatgtacactggaatattattcagcaataaaaaggtatgaagtactgatacatgtaccagtgtggatgaacctcgaaaccacgctaagtgaaagaagccagaaacaaaaggtcacatatgctatgatttcatttatatgaaatattcagaataggtaaatctatacagacagaacacatattggtggttaccaggtgatgggagaagcaggaaatgggagcaagtgcttaatgggtatggggtttttttttggggtgatgaaactattttggaattagatagaggtagtggtttcacatctctttcagtaaatgccactgaattgttcactttaaaatgattaatgttgtatcatgtgaatttcacttcaattaaaacaattcaacaaactttcactggctcccccttgtgtacagaatgaggctccagtttccccagcttcctataggagaccttcacaatccacctgcaacctaatttcccatttcctgtcctgcttttccttcccctgtagtttcctctcacccataggggaatagttgctgttgccaaaacactttgttattgttgttgtttaatccttctctacttgggctgatgttcttcttcctgtcttctttcttggtgaagaacagtagtgctggctcctctatgaagtgcatgcccctgccttgcccctccccaggcagtagcattctttcttggcctcctcccgttgctcacccttgctctggaggcctcctcaaagccccttcgcactgtgctgagggttgtggtggccctgcctcttcccatcatcacactgtgtgcttcatcagggctggaaccacatcatattcatgtttctattcctcatgcccagtacatgccagggaacatagtgggtactcaaaatttgcttttaaacagtcatttagttttttgaatagcaatttttgcttctttaatttcagctgttgattgtggtaaaaaaattcagttgaacttcttttctatatcttgatttacagtaggagtactgtgaggaattagatgggtattattataaatgttatattccggccgggtgcggtggctcatgcctgtaatcccagccctttgggaggccaaggtgggcagatcacaaggtcaggagattgagaccatcctggctaacacggtgaaaccccatctctactaaaaatacaaaaaattggctaggcgtggtggcaggtgcctgtagtcccagctactcgggaggctgaggcaggagaatggtgtgaacccgggaggcagagcttgcagtgagcagagatcacaccactgcactccagcctgggtgacagtatgagattctatctcaaaaaaaaaaaataaaagttatattccttgtctaacacagttgcattttctaaatgattacccagtctgtattcccccactgaagtgtttttatttttagtaattacatgtatatttttctaattatttcctttaatattttggaggaaaataatttcaacataagcttcttacctttagtaaagatgctccaaaaattatatatagcccggggaaaaatctgttagtgatgtattttcttagacccagttatacttactcttacatgtttttttcccccttaagattgtttaacttgggtttctgttgcttgtaataaaaaatatcctgaatattataacttaggatgtacaagtgttgcatagactctggagatatgaaaaggaaaaagattcagtccttgtctccaaggtatttgtggtgagttgtgatgaagtggacagaaaggctcacaattgccacatagtatgataatgctacaattgacatttatacaaaatgacctagtacacaaaggagagaacccttcactctgctgggggaatagagaatggtagcaccatgccatatggagttgagtttctaagaaggagttgctggcaacaggatttaatggtgcctggagagtgtcaacagcctcttaaataaaatgttttatttttatttttatttttattttgccagttgttgcccaggtcacataagtgtaaactaattttgatcagtttgaacttgcttgctaccaagtctagtagagacctgttttaatgactattgccaaaatgtgatttactagaaagtatttcaggctcaaatgccgactaagtgtggcaggttgtttagccactgtgtttctccatactgcattatatttgatggccaaaattaactctgtgggtcagctcactccctgatgtgctggataaaccagggtgccactgcaagactctgcatgtatttatgttatagacacagattttgtgagttgttatgtatctggtgcaagtatatgagtagaagtttgaacttcaattagttgggtttatgaagcactgacagcgtagggcaatatatgaggcatgtaggaaattacaaaggaaataggaaacacaatctttgttcatattgagtttataatctaatggaacaaatataaatggagatacatgataacagataaaataaacataaaaacatagtcataaccagttacagatggatagagatatttgcacaagtgctatggagttgggaaaattattgcaaggactattgtcagctggggtaagtcagaaactgttttaatacaggatgtaaaacttatgcaaaaatattaaggccaggaaggacaaggattagtgtgggggaaatcattttaggaagtaagaatgaaatgaaaatacagagggagcaggcaggctattgtagatgacaataacgttagctggaaaagctgagtatttttaggacatacgtttcttttggaaaagcagctatactagagtaggctaactgctgtaacaatcagtgccaagtatcggtgacttaataaaatcaaaggttacttttttacatcggatccaatgggaatctttgtgtgtgtgtgtctccattctacgcagttattcagggatgcaggtttgtaatagctacattctaggttctaggagtcttcctgtaggttctaagaacctctttcattcagctggtgaaatggacagaaaatggaggataatctgtgggaggtatatatggggccagcttggaagtaactctacccacattctactgaccagaactcagtcttgtgtccccacctccatgcaagagcctgggaaaggtaatgtaggtgggtgcctctgaggaaaaaggcatgggctttgggggacacatcatctcttgccttcacttttttgctagtatcttatgaatctagagcacgtccttctttttcacctgaaatttaggtgatttgagtctccaattttcctatggagcttacgtgccctgccgtcacctcacactcaccactctctcctttcctagcttcattattcattattttttatcaacagtctcttcattcttgtattaccttagcacgtaccttgcagttatggttagcagtgttccttcaggatgcctcttcagcctgttctttcttttcttcttccatctgcacacactcttgatagtgaccttatctcctaatgatggcattggtatagtaagtccctacctagaactccaccccgaatattgctgctacataaataatcattttcttcttgctccattctcatttagtaatctcttttcctcccttttgtgtgagaatgaattccagattcctcagcctgtacctaaagaatcactgttccctagcctcacctccttcctaccctcatttctgacagctaatcacaggaaggctctactccaggcagactggtcacagcagtctctgaattcaaaggatgctaattctgaccctggagaatgtattattttgtacatttctggagcaagtctcagctcatgtcatgtataactcatgaaacctcacacacaaacacattgtctcccagtaatacttcacttgtgtgtttcattcacttctctgggtgcttagacttatctagcctcgttctgctataaaaatgtttgtgtgcatgttttgtttcttcatgtcgatagttaagatccataagagcagggactatgtcatatatctcataatttcccacagagcctagcatgtaactaggcacacaatgattactcaacaaatacttgctgaataaatgtattggatggagatgaagacacttaggtgtagagatttggataggtgttttcatttgattcaagaggcaattgggagccattgatggcttttgagaacaggaataaaaaattattcagggaagggaattcttatggttgtttgtaggatcctgtcaagttgcaaatagacaaatacatgttagagatggagtcaaagcaaggagcctgcttttttcagacagcgaagtggccctgtgccctacagaattagagaaggtggaagtctgaggccagagatttctgataggcttttgagttgtgaaacgtaggatatagaagtaaatgataggacttactgatacctggagacaaagaaataggtggcttccacaaattctgataaatgtagtattgatggtagcaaattgggaatgaatgatgatttgaatgactgtaatgtgttgatttaatagatgttcaggtttaggatgaaacaggatttcagatgcagatgtactacagacattgggaggttggtatgtttgtaagagctctgattgcagagttaggagaccagtgatctaatcccaactttgttgttgttggggtttgtgaccttgggcaagtcattcacactctctgtatattattgtgtgagttaggctagagcatcttcatggggcagatcattgagagtctccctgtataggcaagcatcatagcaacttgagagttttaatacaaatgatgatttcattcgtaatttttgtttcttttttttttttcgcagaattgaggacaaacatttccttacctttcttgctataattatatttcagtgttagccctttttaatccctttcaccctttaactgcatccaaaaaataaatacttatcagttactgagataatggaatggaagctcaattatgctaaaaactaatggttaacactaacacatagtaacagcttcttttgcagtatttattctcttgttgataaaaaaaaaaataagcccaacgacccactgctgcagaaagaatttagctacaagtttatcaatttaagcaggccaactgcacaactaaatgcatgtgaaacttaacaaatcccttgggaaagctgactgtaagaattttctagtctgtgttgagttactgaggtgcgacatggtggattggacttaatgcgctaggcaagcacaatcaaatagagacagtttaagatttttttctgtgtccatgaagggatctctggtaggtgtctaaatgaagcattcagaaaggactataacaccatcatgagttatcttccctgaatattttggaaggttattttggtttagaagaaatccaagtaagattttcacagtggaagctttgcaacagttgaatgatttaagattattatgtgattcataggaataggggaaaatacaaagcattgtcccttacattttaattttaattttcaagggagaaattcaagaatagtgtgtgtgatttcctggacttacttcgggttaaggcagtttgatattctagtcttttaaagttgagcatcaaaactggttttaagaccacacttaccctggaatttcagaagagtttgacataagaaaggtattgtagtaaagtggttgagtgggtacggtctggagtctcattacactgatttgaatcctggtcatagcacctattaacatgtgacttagggcaaattagttaaccacagttttctaatctgtaaaatgggagttatgcaatcattattaggggtgtgtaaagattaaatgaattattaatagtgtgaagcatttagaacagacatgtagaaaacactcaaatattagctatgcaacaactctaataataatttttagtacagtgtgtgttgcttaatcacggggatacattttaagaaatacatcattaggctcctttgtcattgtgcaaacgtcatagagtacatttacacaaacctagatgatatagcctgctacacactaggatatatggtatagcctatttctcaaagcctacaacactgtacagcatgttattgtactgaatattgtaggcagttgtaacacaatgataagtatttgtgtatctaaacatagaaaaggtccagtaaaaatacagaaaaaagaagagaaatggtactcctgtatagggcacttactgtgaatggagcttgcaggactagaagttgccccaggtgagtcagtgagtgagtggtgagtgaatgtgaaggcctagggcattattgtacattactccagactttataaacacactgttcacttaggctacactaaatttattttaaaaatatttttcttcaataataaccttagcttactataactattttactttataaacttttgatttttaaaaactttttgactcttttgtaatcacagcttaaaacataaatacattgtacaggtatacaaaaatacatttttctttatctgtattccataagcttttttctattgtaaaaagttttcctttttttttttttttttttagttttaaaactcttttactaaaaactaagacacaaaccttcacattaacgtaggactatacggtatcaaggtcactaataccactgtcttccaccttcacatcttgtcccactggaaggtcttcaggggtaataacatgcttggagccgtcatctcctatgatagcaatgtcttcttttggatacctcctgaagaatctgcctgaggctgttttatagttaacttttttttgtaagtagacggagtacactctaaaataattatgagaaatatagtataagaaatgcctaaaccagtaacttagtcatttattatcattctcaaatattatgtactatgcatatatcaaatactgtgtgggccaagggttggacaagcttgctttacaccatcatcaccacaaacatgtgagtaacatgttgcgatgatagctacaatgtcagtaggtgataggaatttttttcagctctattataatcttagggtaccacttacatatatgtgttctgcctttgactgaaaatgtcagtggcacatgactatattgttattctgtgatcacttagtgaatctgtatactttgttgggagcacaagtcccatcacgtcacagtttttcagctgcccagtactcagctgataacaattaatctgagaggtgggcttgagagttgggtccccagcccctgagatagctggaaccccaagcggacgacattttccacctagggaaggcatccttctagaggaaactcactctgaaataatctgtgctggaaaatagaggaaaccctttagtttagagtcagactggggtcgaaggggggagttgttccaaatttataggcagtggaagtctcaaagttgttaaagcaactgctccttggacgttacttggtggttgggtcctaaggattcagatagctttcctcatttttttaaatgtcggctttcatgatagcacttgtgagtcttcaatctcactttagacctttgaacaaggatattcttttcagtttttcctataacctgtcctcttgatactgacctgtgtccttatgattatgacaacggtccttccacggaaactctgcccctaacacttaaccctcaacagccaaacttggaagcatgtaactccctccccatgagccagctggctgaccagaaggcggggagccattgacattgacctcagcctcctcccctgactcggcacattgaccacttccttcatctcctcttgctctctggatctctggagcctacttgtctctggctctattgatttttccaactcagtgcttccctgcttctcccttcagaacattcctaatcaggactctcaaagaaaagataaagaggaggcactagaggaggcaaagctgaagggagaaaggctgggcctagagagagtgatcacataatttgtggttgtgcctgggacattttgaggggaaagtgggggctgttcataataacactaggacaacctggtgtaaagctggctgtcctgggcaaactggatcctgcatccaccctggacttaagacttcggtagagaaaaggatttatttttccacccctcttccatattctttccacacaacaacagcgctaccaacaaattatcgtgctaattttttggtgagtaattggcagggggaggggtaaccatgggttaccacagcctggtcttctaagagactaagcaatctggttactaaacacatctaaaaagtttagaaagtctgccaactgtcaatcagcaaataattgatcagtgattattattaccattatttttggccaaatgcaatgggtggactcatttctctattctttctctcactaggggagaacaaaataggattttattgctttatataactgttgggaccctctttataccttccataacgtttcataatgagaaatgttgaaaaaacatttatgtcgggcaatgactggaagcattcttcctttttcctacaagcataacacaacctggcaagccaagtttaaaataatcagaacatttataattctaataggagcaaattcatctatgcatgttttgggtctccttgtgttattttaaataagtggtagaatctattagtaattaattttgtaaacactagtttattgtacatgagcatagagtaagcttgaattatgactttttttgttatccattagcacctattttccaactttaacgtagatgtcacagtcagtggcaatatttgataatagagcttgtcagtgaatgttataattttaagtgttaatttaaataaatgaggttcctattataagtacccctttctaagtgtggattgtaggagccacagaatgtgaggactgggaggggtcttagtagcgcccggcgcaagcatcctggatgccacaaggtgcagggaagcctagaagcacgagtcacttggcttaactcactcgttgcctaattctgtatttttgttccatatctcaaatattacgaaatactactaggctataggaggtacatcattttctaaaaaattgtatatatatgttttcaaaatggtgacctaaatcagcagtcagactgagggataacttcctattttaaagggaaatctctaatttaattaaattactaaatattttgaaaagttatgaaggatccaaagcagatttggctttatgctgcatagtttcagttgtggaattcaaaagagatattgttttgttctgcagatgtggaatttttgtttggtttttagaagcaagtgctactacatgctttacacttaaaatataaagatactgaccctttaacttatactttgtataaacaaaagaaaaatttcagaggaagaatgtttcatgttctagcataggggttggtaaagtattaatattttggaaaggggacagatagtaaatatttctggctttgagggccatatggtctctgtcacaaccattcagctctgagtagtcaaagacaatatgtaaaagaatgagtgtggctgtgttccaataaaactttatttccaaaaacaggcaatgagtgagattagcctgttggccaaggttgccaactccggttctagtgtgaggatagagctctaaattcaatattaacttagaggaaagccatagtttaaatttattccagttaaagaagaaagaaaaaaatatcctgtatcatattgtttaccaaggaattgtatgtaattaggatgtatacttaattaaaataattcctaataaaatgctaagaatgatagagaaacaccagcagagattattactgcaacattatttataaaagcaagaaagagaaacagcctaaatgttcattgatggagaactggttaaataaattgtggaaatctgcacggttaaaaaaaatgaactacatgtattattttactgacaaggaaatttatccccagcactatttcttgagggataaaaaagcaagttatagagtaacatatacaatacaacactgtttatgctaaacaaaaaagtcacagaagaatacagtatattttctgtaggtaaaaatatatatttgtgaatttatataaagaagctataggggagtgcataccaacttgataacagtgattatctctgagcagagactggtcataggagtgttagtcaaaggtcaaagagaatgtgaaatcacgaaatttaaaaagaccctagagaatgacgtacacaaaagctagacagacatttacattctgaagagtataaagaatgaggacttataatttttaagtttaaggttgtagcacatggaagttatagtctttgtaattttgagggttttataggaaatataagaaatgaacgttaggtaagaattctacctcccatagaatgggcatgcgatttatttattgcgtaggccttggatgtacagaaaatctttgaacattatgaaatttgagaaactcaataacttagcaaaggtaatagactgaccactgtggtcagcaatttatgagccgtatgtcagtgttatggtcagtctggccttaggaatttatacctgtgcttgtgtcacattttgatagggaagcttattttgcaacatgctaccttctcaagtgaaatctgtgaggatctgatgccagtgtaccttaatttagcatcatattgttttaaaatgtgactgttatagactagcatagtatgtgagtccagacccagactggataacaacgtaaaaataatcttgtttataggtggagaagaggctctattttcaatctagcaagtatttcttgagggccgactatgggctcctcactgtattagaaaagtaaatgctaataaaagaaatgtgaatgacagcttctttcctgaaagagcaagccacctcactggggaataagaagaaattaaataaaaccaaaagacatcatagttttagacaccaatgcaagcatccagtagtatggaaagcagattaggggaccagtgtgggctctaacagttgagggtcagcttcttgagagaattgtgtcttgatttgggcctcaatgcaaagtttggattgatatgggaagatggaaaggctgatttcaggagggaaagtgattgcaagcaatgatggtgaggcagagagcatctttaggcatctatttggaagaagagcctaatgtagtaatgatgacggtggcaacaataatgacattaacactggtgctggtgtaatggaagcatgagcagtagcataaatagtggtagtagtaatactagagtcttgttttttcaccaagagttttatgccaggcaagatgctaagtgtttcacacccttatcttttctgtctcactaagtccaaggccatagtaccactttttcttcattataaaggtgaggaacctaggtttagagagatcacataactggccaagaacatgtggctggtgagtgccaaagcaggtatgtaaacactttctgtctaactccagagccccaaacctccaacaccaagcaggcgcagacaagaccaaccatagtctagtgctggttctgacactaaggaaccccttgcctcattttccttcaccataaaataaaggcactggacagtgtaatcttcaagattcattgcattcgttccacgattcagttacttccacagagaacagggctaataattgtactgtgtggattggatgagacaatgagataatgcatggaacagtgtcaggcaaacagtagacattcaataaaattttagagtctagtaaataaaatgttatcatctcatcatcaaacagccagtttaattaattgcctcaacatttattctactggctacaccctaaactctggatgaaggagatgttgtatagttagcatgaacctctctgtttacatccagggtggagaacgtccctacagatgtgggtcataaccagggggataggttgtgagagatcctctttttcattgaaatgtaactgcatacctattatatttggcagtagcattctaaaagtaccaacaaatacagtttcaatagtcaaagtgagaagtggacaagccagttctccttcacactaactttgagccaatctatgtaagaaggtacatacttacaaatacaataagctgtcacttaatgtcattgataagttcttggaagctgtaagcaaaatgatatataatgataacaattttaccataggctaattgatataaaattggcataaataagaattaagttcctatgagatatttctggttgcaaaaacatcaccaagcttctaaataaagactgcagactcttctaatattaaacattgaagtaggctgggcatagtggctcacgcctgtaatttcagtgctttggcaggccaaggagagataatcacttggggtcaggagtttcaagaccagcctgggcaaaaataaataaataaataaataactgggagtagtggcatgcacctgtagtcccagctacttgggaggctgaagcggggggatcgcttgtgtccaggagtttgaggctgcagtgagctaggattatgccactgtactccagcctgggtgagtgacagagccagaacctgtctcaaaaaaaaaaaaaaaaagaaaagaaaaacattgacataaatgtgagctctaaatacatttaagaaagactaataattatttttgaaacttttgttgaatttgtgagtaatggcagttactgtggtgttgggttaaatcgaggaatagatgtttgcaaaagtgaaacttgtaagaggcactttcaaccatcatgcagttcaaaaacaataactgatgtggtggcacactgagcacttttgtactgcatcatttttcaccatgcatttgtatgattattgtatacttttaaatttttatttgacaataatttgtatccattcattttccaacccgcttattcaaattcagggttatgagtggccagagcctatcctggcagctccactcagggtgcaatgtggggaccagccctggagaggacatcatcccatcacagggcacattcacacacccacactcactcagactgagacgatgtagacatgccagcaggtcacttaatgtgcacagccttgggatatggaaggaaatcagagaacctggagaaaacccacagagacttgtggagaacattgaaaactccacacagacagtggccctggctagaaatcagtttttttttttcctcatcaatgttataaggaaatgaggttgaacaaaatgacattgttggaggacctgctgtaattcataagaaatcagcaatttctaaagcagagtccttcatttcctgcttgtttttccattgtctttagtctttatgtgctacttacacttcgaaaataatttaattataaaccagatatgctttttccttcccttccttgtttttgcttttagtgcctttttctccactttggtgttgcttctaattgcaggctgtgagaattgagatgggctgcccaaggtgtactcttggtttgtggcagacatgaataaaaaattcaggtttcgaaaggccagggttcatgtgcttttttttatacctcacaaagacttttttcttttctttcttttttcttcttcttcctttccccccttagcaatagacctgtttctccatataaaatcgtacacaggagcccagcatgtacaacagatggaagtggtgctgctcaggttgagtaaggcctggggctgtgcctgccttcccttcctctctccagcttgtgtcctccctccagcatccaggcctctgcacagaacaattaaaaacagccttgccctatcccttataatttcactaatgatacaggagcactgtgagttttatcacacttgttacaggttttaactttttttctcttctcaagtggtaggggtgtagagtggaagagaattgagacccctacttgcacaaaacaaagtttttagttgctatctacttcaaatattcaatttctaatattggctgattattgcaatgaaggcatgtattggtggatgtaaccaaagtttaaaagaactaataacttgctaaatagcgggaaccatgttttttgttttctgtcttttaacttagagtttcacttttcagctttagaccctatgagaatcttcaaattaaatggtgtcaggaaaagtatataatgttttcagcctcaaagtcatatctttttttttttttttagatggagtctcgctctctcgcctgggctggagtacagtggcgcgatctcggctcactgcaacctccgcctcccgggttcaagcgattctcctgcctcagcctcccaagtagctgggattacaggcgcccgccaccacacatggctaattttttgtatttttagtagagacggagtttcactgtgttccccaggctggtctcgaactactgagctcaggcaatccacccgcttctgcctcccaaagtgctaggattacaggcgtgagccacagcgcccggcccaaagtcgtatcttttgattaacatgtttatatataaacagtggcaaagcatgaaagagaattcactgtccagatttgttgattagtatcatgagtagtggaatctgagcgttcttggggactgagaaagcagtgggaatagatgggttttctgactgaaaatgttccatacccttgtgtgagagcaaatccaaacagtcttctccactggacctttgtctgcttgctaatgagatatactgattaaatgagtaaaataagtcagaaaaagtattgtattcttcactcagtttctccatacccaaagaatacatgcagatcagagtagatggtttcatcatacaacaaatgagaatgttggctgttatttcataaatacatggatctctttatccctagaggttgtcttgtctatttctccagttattaaaaaggtttacagcagattctcttataaaggttttaaaatgatccagacttagcatttctattaaaagaaaaagtctgaaatggaatttggaatcatgtgttttggctcattttaattagtttaagataatgagtttaaaggaaaatttacattttggatagttttactatctcccttttttgattttaaatgtagtacatacttattgtatgccacacagtgtacagaaatgtaaagacaaaaacctgtgacctcacttcacagaaatataaccatttaaaaaaatttggtgataatcttgtaaactttttatacatctatacatttaaaatatattttactgtacacactgatcttactatgcttttaaaaagattaataatgtattttagaaatctttacatcaacattttctatagttgcacatgatttaactgcacattattttatgtaagcagttccttattaatggatgtttaatctgatttcagtattttgtttttataaacaatgctgtggatatctttctgcatttgggtatgtgtcagttactagatttgttagggtaaatttagacaggtggaatatgcatttaaatttggataaatattgtcaaaccgctctccagaatttttgtcattttcttttcatgtcagtaacaacatggaaatgtcacaataaaataagctgaaaaaagaaataaaactatttccacttttctatatatgtccaagtgaacaacaaaaataatttagtctaaaacatcttcagtgcaggatcagtagagttgaccttactccttacttcccataaggtattactcaaatcagaaaagcatatttaaaaaattattctcataatctctttagaataggcaaagaaaaaaatgttaatttttagctaatattaaaatgttatgctgtcacattatttggggaggatgctaagatgcatttttatggcagagacacagataaggaagggaattgtttatttatcgagaatatttgttcaaagattctatttcataatatgcttttagtatgaaaaacatataaataattgtggagaaatataaatttgttttttgttcctgctaaagttgtagagatacatttctaattagtatcctcaatataaaataagctactcaaatgtcacaattgtaataaaatattataccattcatttgaactaattcttcagacaatgatcacatccttttatgaaaatcattattaatatagtctttgaaatgtgatgtatgacatatcttaaatgactaaatgacacataatgaaaacttaggatattaaaataacaagtcatatttattctttttagtaaataaatttgttgaactgtggaaagagaaggtttgcttgttttaggtacctgggtaataatattacttcttagattattttttgatgagggaaaaatgaatggaataaacattccaagaagaaaagaacaccagcgggaaattataaaccaacatcaagaggttggtgaacataggaacttgattccacatggaaagagaagaggtacctctgcctcaccagagctgcacagcaggtgagggagactcccttggagcatgaggccgggccttcggaggaagcactgctctgtgctgtgcccagcagtaaggagtattcacaggtgctgagttgtagaggactcttactcggtacactccagatactggcagtagtctctcttgggaggtggcaggaggctgtatgtagatcagaaatggctttatgaaagatagaccacattcttggagtgagaatatgagaattaatgactggtctgttaaatctctttgaagccagggggtgctaccagttctgctgatcaatgtatttaggagtgagatggttacaaaggcctgagaatgtatctctaaagttctggattctaacttacaaggtttgagacaaactgtcttcatctgtttttcaagctttcaggactgggaagaatgaccttcatgggtggcttgttgttaggaccaagagggctttaaattgaaatttggggctagtaaagagaagaaaataaaaataagcaaaacataaaattaatatctgactaacaaaaaggaagggtgaatgaaggtcctgaaaattctctggaaaccatagtaataatggggatggaattaatactgtcagatatctgtatgctgagtataaagtagaggttttaagcagaaaactaaattacagcataaggagtgtgagccaatcttgtcccaaggattaaggagaagaacttacaatgtaaggactaacctttctctttgcaagaagcagattaaaaaaatgcagaggacccactatgtattatatagatgcacatgcagtactcacacatatatacacacacagaatatatatgcatacacaggcaagtgtgtgtattcacatacacacccctacatattctcaagaaggaaatacactaaaatgctaaagaaattacctacgggcagtaaaattgtgggtaattgtttctctgcttctttgtatttttaaatgtttcaacagtaaacatctattactttgacaatataaatagtatttaagtaatatttttaaatcccagaactatcaaaacatatttgagtagaaagcacttgggtatggataaaataattgaaaagagtagtttttggctactttttgaaatgaataatgttttaattgttgggattgtaaaactatcagtcgtgtaggtatagtaatgtcagggaatttcatctctactgattgtctcctaaaatctgaaaaattgatgctttgccctaaaaaacaatctctcaaatgattgaggaaacgatggaataattgaataccctcaacttaattctaaattaagggagaatttgttggtcaagtgaagactgtgtatagctagacctgtaactgagaatttaggcagcagatttttaaacaatccaaataaaaaaaatttttgccccgcttaatacagagccagtgtctctgtagcacttggcccatggtagataatctaaaaatgtgatatgtgaaattccatgacttaagactgtaaaagactgcgtggtatttagtggacatagcaatattcatggaatgaatgaatgaatgaatgaatgaaaaggtgattgagtgatggcctgtggatatgggaggctctaataataaaattctgacaataactgatacccaaagaaaaagagagtggttgtctaagcatcacacaccagttttcagagtacacatgtaaaatatagaaccatgaaaaaagatttaaagttgtgtatggaaacagaaaaaaaggaaaaaaaaaaaaaaaaacgacctaacccattgcttaattggcaccttctctgtgggatcctgtagcagtttttttgctctcctatgtgttcatttctcttttataaaatacttaaccatttatttctctgtaactccccttgcggccttctgccccacctccttcctaatttttaagcatactgtgtcatctttgtgttcctttcattctcataaaaaatatttgcacattccaggcgtttcataaatatttgctgatttgcattgtttggaacagatggtataatgttaaaagatgactacagagaaagaaacactactaaattctatttaatttctgttttctctgtgaatgataatggtttttcaaattagaaagggcagcacaagcataactaaaagaacctgaaaacctcaagtaagtgtagagattctaaatgagcccctaactgccttcaatcgctacaaattcatctcatggcactaaaggaattttcagctgggactttggaatcactcttggaaaactttggaaaatccaggaaagaggagagatgagccaatttcttgatattttgcaacaaatggatgcctaaaattagacgtgttctgtgatgggaactaccaaatggatgaattgacagctcttgagaagacagtagtcattagatgccagccaggatgccaggctaacctcatttccttttttaaaaaaaatgattactgaacctagagtagaaaaattcccagggcatagtgtatctcagtttatgcaagtcacctgagaagtgataaattatattatggttgtgggcattttgtggatacatgtattgtatggtgagggatttatgggttttggagcaaatgatctcccagagataaattaatcgaatagaagtctggtctttaaagagatgctgctttaatatggttctgttcaacagttaatcagagtcccatttattcatgttttacaagtcagaaaattaaagaggactggtcattgatggtgtgggggttaagggtggtctaaacttaaagcctggccctgtcattagctgagtgaccgtgagcaaattactgaacatctctgtgccttagttttctcatttatgaaatattccctaaatggtagctagtgcttatttagaatttactgcactaagtgttttatatgtgaaaaaaactaagccttagagagattaaatagcatcaagtggacagaaatagatttcactaggattaataatgggcaaagaaaatgaaatctaggagcaatacatgtaaagttcataacatttgtacttttattaaatcatttccataaaattgatctaaatgttttagttgactgtgagatgaatatgattcattgtcatgtcgtggctttaaaaattagaaacagaaaaaacagcaaacaaaaaaaaagaaactggtcccattactcttgaataatttggccacatctagaatatgtatctttttctttttctccagcaatttgttaagagggacagattgtggaggtggacacaaaggcacaaacggactagctggaagaactagagttaataagtttggaaaagtggaaactttgaaggaagcacgaatgctgtcttaaaacatttgaagggtgtcatttggaagagggatcgatttatcttgtgatgctccagtggcagaatgggctccaggggtagaagtgatgggaagtccaatttgacctttacatttttgctgaccttcagaaccatttaaagtgggatggtcttttcaggatgataaacatcatcttctccaagtcatggcagaggcaggactttctgagagatacaatagaggaaattcccaagttggatgggggtaaatgaactctcatttctcttctaaatctaaaaatttatcattctgtgagagactgaatctttgaaaagaatgcattttctaatgatgagtgttactggttaaaggcacctactcttctttaactttatgaatttacttgaattttttagaacataaacaagttgaaagtataagaaatatatttttcattttcaaaaatgatgactatttcagtgttattgggaaaaccataattttagttagtaaaatttaaagcactgaattcattaggttacaagaaaggcaatttcttcttcacaattaattgtaagacatttcttcccttattgaagggaaatcatcgtgtttaaagagcatttatgttgagttaagaaggtgacatttctttgacgtttgtatgcacataaaggtaacttgtagagagatctaagaacacagggagtgcaaatttataaaaaaaaaaacctttcacatgaaaagctacttgatatgtatcaaatatactcttggacttcataaggttattcattttagaacttgggttttctttctttctttttaatctcttaagattactggctacagtattatcttgcccagattcataacattctgttagaattttgctgaataaaaatgagtatgattttagtaaggaagtgtgtttgattcgtacctcgcctccccacccaggtgtcaggccagcccaagctgtttagcacaatgaaagttcttgtttgaccataactgcacatctcactccacaggcaatcagcattttaattagtgattcaaaggaaagtcattgtcctctagttgctttatcataattgccaaataattttccattgaataaataaataatgtaaaggagaaacctcccctcataatgctgtcattaaggcttcatttttttacccgctcatttgtatttgtattaacacacagcccacttgaaagggagtaattataatggctttctgacagtagcctatggctttaaaaaaaaccggggatggtttccttttctatcaccactttgcactgcatggcttattttaaggtttagataaaggaagctcttggtggctggtgtctcttcaaaggtgtgtgaaagtgaatgattgatttgctgtgtgcatcattggaactaggtaacttgcattatgactctgatgtactgtgtaattgatgcaagtcctttcatagcattctgagattgaaatcaatattcgtttggagtgcaacaactgtaataaactacactccttttgtaagcagtggtctaaggctttgtaaaggatcagttagaagggacagattaacattttggtcgggccgggatctatttgaatagatatggagaatgccttctaaacaaccccatttaaaatagctggtttcatgaaattaactttttgattttgccatatagaaacttcttttgctttgcctttatatgagtctcttttccatccgattacaaacctgggcccaatggagaagaacaataattattttcatgaataagttgattttcatgaaaaccaccacaaatatttatataccttgacagaaatgtcttgtcagtattatatttttcaaaatattgatgattggcaattggaatttgcattctttatttaaaaatgggtatgtcttgacaatatctagtacagagtaaaacttcagataccaaagagatgccttctgaagaacaaagaaatcagtatcaattaattcttacaaccagatagtgtatttatcatcataaatattcccatacgagaactggcagtgtagaggccaagagggctggttctggggtcagacaaatctgagttcaaatcctggctccactgctagccagctgtatcaccatggaaaagtgatgtaaactttagccccagtttactcatctgcaaaatgcaaatgttaacggtaagtacccagagtaatgcagggaaaatccagtgaaataattagcatgaaaacattgaacacattgcttggcacattttaagcactcgataaatggtggtgaatcataaagacaatatgtcatgcccattttttggatcagagttcctttctctccaccccatttctacagccctcaaagtgcctctcagaatctcattgcttggacagcaaggatctcagtggctattttgcttcccagctcgcctgcttctgccacaccaatctttaaaaaatattggtctgcctaaagctgttcatcagtgattcctttcaccacatcaagtccaacgtttttgtttctttttttttttgagatggaattttgctcttgtggcccaggctggagtgcggtggcgtgatctcggatcactgcaacccccgcctcccgggttcaagcgattctcctgcctcagtctcctgagtagctgggattacaggtgcgtgccaccacgcccaggtaattttttgtatttttagtagagatggggcttcatcatgttgcccaggctggtcttaaaactcctgaccgcaggtgatccacctgcctcagcctcccaaagttcagggcattacaggcgtgagccactgcacccggccaggtccgacatttttatgttcaactctattcttttgtacccactgcctccaatttgttgataagtggcttgaagggttatcgtgagaagtagaggatgttgcttatggaaagtgccttgcagagggcctggtactggatcatcatcataatcatcatcagcagcagcagcgtgaaaatcaaagccagtgcttcaatgcgtacaaagattaggcaatgttctaggtgttttccctgaattaagaactattatccccattttacagaagaggaaattgagacacagagggcagttggtacatagaagttgttcagtaagtgggagttatttttactattaccttcacctgagtccctgagtagtttccttgttttctccaaatgtgtatatttcttgcacattaggagtcacaaattatggcccaagggtcaaaaccagcctacagacacatttggtttgggctgtacatggttttagtaaccagagattttcacataaaaatgcccttcacatgtgtgcacccacccccttgcccctctaaacttcctaaatcccacctatttttcaaagcaaagatcaagtgccttcccactgaagtcatccctaattatttgcaccctaatattcctttctcttctgagcccctcagcacttttggtctttttatatatttaatttaacattaacttaggtaataaataaaatattttgtgttgtcgactgtaacatgctttcaccaattaggttctcatagcaagggccaatataataattgcaggagtggtaatagaacaataactgttaccattgatgacgaacacgtattttatacatgtaaaggctatcccataaaactacatgtcaaggtaggtattatcatccccattgcactgatgaggaaactaaatggagacttgcagaggttaggtggtgtggctgaagtcgcaggctggacattccaacctgcatctgtcagatcccaaaccctgtacttttcccaccttattcaccaggctgcatctctgtagcctcctgctcacctactgcatgttgaaccatgtcagaggaatcgtgattggcctttaaaaggtatatttacctttgtttacaaaatagaaggcataaactttctgtcaatgggaaaataatgaagacagagattacgagtcaatatgaaataacttgaaaaatacattggagcatatgccttgatttttgaagaaaaagtctatataagctgcttaaatattaccctgcagggcatttccattaaagttgttagaaattatacattcttggagtttaaaaaatattacttttggctgggcgcggtggctcacgcctgtaatcccagcactttgggaggctgaggcgggcggatcacgaggtcaggagatcgagaccatcctggctaacacggtgaaactccgtctctactaaaaaatacaaaaaagtagctgggcgtggtggcgggagcctgtagtcctagctgctctggaggctgaggcaggagaatggcgtgaacccgggaggcggagcctgcagtgagccgagatcgcgccaccgcactccagcctgggcgacagagcgagactccgtcccaaaaaaaaaaaaaaaaaaaaaaaagttacttttgtgtaagaaaacccaactcattgtttatttagtgcctgtttaaaaactttacaatgctctccttcccctaattcattgtaaatatttaaaaggataaataatatattttactattattaacattcatcaaaatcatgacagctttttatttgccagtgtcatgtttgtaagtttttgttctgtggttgctttacagtgagttgctgtgctttagtcaaaagttgaggcatgtgactttgcctttctgagtgcagacagaatctactccccttaaatttttaatctaaaactgttaacagttttacaaaaagaagcaattctacctgagagctgccctcaaagacatctgtactcttctaagccgacataacaaaaatagtggcaaacacaaatttaaaaaaaaaagaaaagaggccacactaaaacctttctcagtcatgtcttctgggctgtcaccatcaaatatggctaccagttatgatcacatttcacatctctgacacaaacggtttgacaagaagcaatctgaaggctttcagaaagaaatctgtctgcagtattttttgtgtgatataaatattacaaggtcaaattcatttttttctagtgagacaaaatgttaaccttacacttggattcaatgctgacccatgacatcacttttggaatgaatattttttttcattggaaggtgtgacctaatctccatatttcttctatgtatcttatttcctaatttgactttgagtcagaatcaccttttttcatacatgtgttgatgctttctgctgctggaaatagatctgtaggctgttaacaattattgtcattctaatacattctaaaaatgcattataaaggtggattgattctgtagttttataataacctgaatgtagcattggtaaaatagatgggaagagtattcagaatacatccttttcatattagacattaaaatcctttagtagttttgaggttttaggaaacatcttttcctgctcttggtataaaataatgatagagcttttgtcttgaatattcttttgtgttttttaatattgtattacaattgagagcctagatttgtttgcttattgtgcatgtatttacagaccatgcaaaaatccatcatccgtagcctggccttattatccagtgggtctcacataggcatacatttagatcaactcagcaaatacttattgaacatttactgtatgtcgaccactaatgtaggggtgcaaagatgaaaaaagatactgatgtggcccttagatgttcatagtatggataaattgaaggaaaaccagacactttagtttgtttttggcagaagagtaacttggtaggtcttttggacagaacaagagcaatacacattcaagtaatatatgtatatgtgtgtgtatatatatgtgtatatatatgtgtgtgtgtgtatatgtgtgtgtgtgtgtgtgtgtgtgtgtgtatgtatattccccccaccaagatggagtcttgctctgtcacccaggctggagtacagtggcatgatctcggctcactgaaacctccacctcctgggttcaagcaattctcctgcctcagcctgcagagtagctgggattacaggcgcccaccaccacacccggctaatttttgtatttttagtagagaaggggtttttccatgctggccaagctggtctcgaactactgacctcatgatccgcctgcctcggcctcccaaagtgctgggattacaggcgtgagccaccgcgcctggcctcccaagtaatatatttaaatcatcacatgtctccatgtctctagtggctaccatattgaggagcatgggtctgtaaaataagaagacctttgattaattgaaaatcatgttcttgagtactgtggggttgagggaaatgcttaccgtataatgttaagtgaaaacatttatttacaaaacattgttcacaatttgtatcttagttgaaaattacatatatatcaatacacacacctaagactatagaaatacaccaatgaaaatgttcacataggctaattctgaatgttgggattatggataatttttattttgtttatgtgtatctgtagttttcaaactcttcataatgaacacgtattacttttgtaatcagaaaacaccaaacatgcagaaaatggatcttttcaatattgtagaccacaatacccatgtaatgtttttaaaatctaagttataaatcaggtatagttttgccattaaaatacatcctatagctatgctttctaaactattcttaacatatttgtgcatatctaaattgttagggtgctcttgaaatgagcctccaagtcctctaataaaagtaacgtatgtgtcttcatagattttaaaataagaagtttataaaaaaagagggagaggacagaggaggctgctactgcacaggtacagtgatcactgagattttagaaagtagaaggcagctggcttaaacggttttgagcaagcttttggatcagacaaatctaggtttgggtcttggctttgctactgactggttgtaagaccttgggtaaggcactctaagtttctgagtcttgtgtcttaatcttaaaaatgggaatatcaggatatgccttgctggcttgttgccagaattgaatatataatacacataacacaccaagcatgaagcacacagtaggtatcagtattagttctttctgcctaacctgacctactcccaatcatagatatagttcaggtgttaacttgctggtatcctctacaagagaggttggttagagcaagtctgccaggctaggaaatatcagggagatcttaataagtttctgatatggtttggctctgtgtccccacccaaatctcatgttgaattgtaattcttaatgttgggggagggatctggtgggaggtgattggatcatgggggtagatttcccccttactgttctcacgatcccgagtaaattctcacgagatctgatggtttaagagtgtgtggcacttcccccttcattctttctctctcctgctagccatatgaagaagtgcttgcttcccctttgctttctgccatgattgtaagtttcctgaggcctccccagaagcagaagtctgtatagttcacagaactgtgagccaactaaactccttttctttataaattacccagtctcagatatgcttttatagcagtgtgagaatgaactaatacagttgccaagtaggttccatagggaattgtcaaaatattgaaaaagagatatttgtaatttgattatttaaaataagatgttttaatttcatcttcttcattgaggccttcaccgccaatagcagcctcttctcttgtctactactacaaaaggaacaaaattccaggttgattttaggtaaatcaataagaggcatatgtcaaattcaaatcattatttacataagatgaccattattccatgcaaaaacatagcgtgtcctcccatagctagtcttctggctggccccaattcaactgtcaggtcccagcctagatgccactttctgggacatctcagatacctcaagtttggtttgacctttctgtgtacctcttatcttgctcacttgcaattgtatgttaatcaactgttcttcactaaatgtaaaccttcttagggcagggaatctgtatggttcctccttgtatctgcagtctttgccatagtttctggtccagtagctattcagttaacttcggttcatgtgaatggtttgggaagaagtcactcatgttaacggagtctacacagcaacaacaatgtgctaagtgattttcctttttttttttttgttcctctctgttcactgtgttcttcttgctggtttctcatattttatggagagctaaggaggaatcaagatctataatctttcctgtctgattttacttcttcctaacagtgaatttactgtcctttttactcttccttccaattcattcactcctactgtacaatctgtctcttagctgtagtatactcattcatcagaaagctagtttaaatatattgttagtcttttgtatgcctttttattgcttttgttaattaacatttcatgtaaataacaacagatttggtttcttgaattcagagcttgagttcctcatccttcccccctacacccctttcccttttttccccctgttacattgaagctattcattttattatggagtttagcaaggcttaatcctctgtagctaaattccagggactctctaggatctgccagctcagggaaaggggtggtgttagatgtgatgtgcttcatgcccttccttcctgcctggtaagtgtatcattttctccagttgacccagtgaagggaggttaccaaaacgcttctaattcctaggtcagatcatagcctctagcctggaccaccagcgttggcagggaattgggccactgccagacacttggagttaggcacaagggccctatttttctggggctgaattgagtagtcttcctgctccctcctcttctaggagtttacatagatggaaaataagttttctcttttggcaaaatagcaaggcagttcagagaaagacgtgcttgggctctgagtcaggaggaatacgaatcgttggaaaagctggaaaaggcctgattttccagccttttctttctaaagcttttattctctctctcaatatatattggtataatgagtttgttagaaaggaattccattttttaaaggttcatttacttaaactacttactcagattaggttaagttggtatttctgtctctctttctttccctctgtcttgaattttcttgtagcccagcttccacttaattttggcagcttggagatcccattttattttatgaatgctcattgacgagaggtaatataattgcccccacccttcaaaccatctgcatttgttttctgtatcatatgatttagtgcttggctataaacagctgtattatagattcctttcccttctatgctaccctttaataagtgaatttacaaggggcagtagatctcccagaagcaatatacatatttttaacagtatgtggggaggctgaactaacttgtactgagagtaataggctggatatcatggaaatgggaattggcactaatagctgctctcagataaaacttttcctgtgccttcttttgtatatcacatgatactatgtccaatgtacagtcaaacttaaaatagaaaaaaaatcaaatacatggtagtgagttttcaaactcatataacctgggctactttcacttaacacatagttactcataaaatgtcacttttttatgaattcaagaagttttttgggggtaaacttagtgcctcatgccttgggccatcatgtaggttacactctagtctctgtagtgaatcttagttactctctgactttggaacacttggtctttgcctccacgtgtgaaatacatttatagcttataaacaatagctttccctttaaaaataacatgtggatttgaaaaaacattgagatcttttctgtatttctgcctcagtgtcattcattgacattttactgtgtcatttctgtgttgtgttttgtgactaaaccccagctattccctatttttaaactgatagatgggttttgataattctgctttacaagggaaaagcttgaacaatagtgggaatgataaaaaataacaagtgagtgaatgccaccacaaaataaacacaaaactttgtgctatagacattattctcctgctactatttttcttttcatgctggagtttcactgttagacaattttgtcattttgggatatatttggactctgtggaatttatatttatataattcccatctgaacctagtatctatggcagttagcataggcagatatatcagtaggtagaatagtcatgtatacctggcctggagtagttgtgtacaggtacagtgggaacaccaagaaatgaagaaatacacttactgggaaaattgaagaaaacattacagaggagatgatgagggagactttttttgaggtgatggaggagatacatacatacatatatgtatatattttttagattttgtttcatttaagttccagtatatgtgtaggatgcgcaggtttgttacataggtaaaagtgtatcatggtagtttgctgcacctgtcaatccatcatctaagtgttaagcccagtgtgcattagctatttttcctgatgctctccttcccccccgcccctgatgggggaggtattttgaagacagcttaggagtttgattaggtggaagtgatcagaagtggtttagtcagagggtgtaagaggagcaaaggcagagtagaggaaaggcctggagtgggggaagaacaggggactgtgtgatgcagctagacagaagggaacataggagtgaggcgggtagggatacatttttcacagcaccactggaaagactggcatgccaggtgaagtgacggacgctttctcctctatgcagtggggagcattgacagtttaagtggggaagaggatagagtcagtttcttagaataatatcaattttaatatttaaaaatggatcaaaaagtgaagagaatcttttaaagtaaaaaatgaagggagactttgatcaaaagtgaaggggatcatctaataatctggagaagactacttgtagcataggtttcagtttcttaggagagctcttgaatctccaaaaatcagcccagtatttccattaatagttctcttttattaaagagacttatattctgaaggggcttaaaaatatgatgtattattcattatttatcacactctataaaatatgagttggaatgttagcatttctagtcttttgctcagactctccaacactgtggcacatggtcctggaaggaactgaggaccaccaaacctggtgatcaaatggagttgggtcttttcatttctgcaattaagacagcccattccaaattgtgagggagtattactggcataacagtggtgtgaaaatactgaatgccaaaaccaaaatgagaagaactgagtgctgcccattaagaaaaagcatcccagatgattaattatgttgacagactacatccttaaaatatttgccctccaaatggattatgccaatttatacattgtgtacttgttgatattgttggtttaatagtggcagaattacaactttgaatcagacttccccaattaaactgttgattcaagtggtcttaactgtctcagtgagttgtacctccctttggcaatgcttaataaatgcaaatctaaaatgctggcattgtagctttaaaaatatgcatattgtctggctgttgaggaaagtaaaaagtaaacctgaacatttggatttcaaccattgaagcaaagacagaaagatgattgaattcagtcttaaattttatagaactaaatttaatggtgagcacaatcgcgcttggtggtgattgttttcagtcctgctttattaagttatgtaatggcaggagttcaaactcagtgattgccgaaatggtaaatttaaggagtatttgagattgcctgccaatatgcaagtgtaagggtttcaaagtgcagaaaatattatttccaccttcctatttctgtagcttagaattcttattcaaatagtttttagggattatatttaatacactgctttaaaaatgtttaaaaatctcattttattccccaaagatttgttttttgctgttgcgattagatgatgacagctagctggcttttaaaattgatcaggaagtattctggcagtcattcagtgttgtaatagcactttaatggatatgagctattcacccagatcagactcaatgtcaaaacaggcgaaaatacagctgtcactctggacaacaagatactcatatgcaagcagctgcttaatacactgtagaaaggcagccttttagtaatatgtaaaaggtgtgtcaatgccagtgtatgagtatactgtaaagtcggtgtatgccatttagaatggaggacgaggacatgcatgtattttgtctgtacatatacacaagtgcattctgtgaaaataacctacgtatgcactagagacaagcaggagagccttatttcttctttgttttaatagacatttttttgtgtttaatacatgcaaacacatgcacacccccacacacacttgtttgactgtgttggtggaagcctggtgttaatgaagtcaaggttctttattcaatctccgtatgaggccagttaaccccgttctgaactgaactcaaatgctgagccctctctccagatagtcaacttatacatgcaggcattgattttaaggagagccaaaattgaggaaagcacaatcaggacaattactgataaaattactcacagcatttcagcagcagactggtgttatttccattattacctgaaggacagtaccttgctatgataataccagtaacttctcatgttctgtcactaaacatcttgaaacaacttcatggatattaatttatttgattctcgagttagttatatgaaatgtatagcaaaaggaagtttattatccagttttatgatgagggaactgaacggttaagtggatgccaatgtcatatgcctagttatggctacagcttagatgtccagactccaagttcagttctctttttatgacgcatggcaccttcctacatttgtagttgttaactcactatgtgcttttctgtttgtttgtttttttagagacagggtttcactatattacccaggctggagtgcagtggtgtgatcatggttcacggtagcttccacctcccaggcccaagtgatcattccacttcagcctactgaatagctgggaccacacgtgtgcaccacacctggctaattttttattttttgtagagatggggcctcacagtgttgcccaagctggtctcaaactcttgggttcccgaagttcccaaagttaatccccctgccttggcttcccaaaatgctgggattacaggtatgagccactgtacttggcccttgccatgtgttttgtgaacatctattgcatgctccagattgttctaggtagggtaaatgatacaaagtgattaaaacaaagattttgatctcacagagcggaatgtaatagacatataatttgctgcatataagtagacacaattctaagccaaataaatgccagcatagaaagggaaatcagatgctgtgacagtatggaaggaaagcccatgtgaagactcatcttagatgactgtcggcaccctttgaaggagactatgataaagtctagattctgtcaactgaacaggaagttgagaataaggacaaaaatttgtttaggtgaatagtgactgctcatggtgaccagaatgcaagataaatgtaggaggattgtacatgatgcggctgaagattgccagactgaacatttgacttagttctgcagacaaaagggaaatcatgggaaggttctgagcaaggcaatgacagattggaactgggttttagaaagattaatttatcagtggtgcataggagagatagaaatggagagagtaggtacatgagaagaccaattagaaggtagttacaacattcaaggcaaaaggaaatgaaggcttccaggaggatgccagcatgcctaagggttatttctttatggagcttttgagtgcattagaacaccacagcacatgtgattagtgaccataacttgacttctaactgctagcattcttgctccaaggctttctctgactgctgaagtcctggccagggaattaacacagtctgcatggactgacagagatggtatgtaagtacaccagtttctccactctatggatgcgctaatccttatatgcggtttacacggactcccagagttccttggcaggattgagctccagtggtccacagtggtagcactgactgcatattcttacaggctgccttgtcttccctgtgacacttctccacacccttccagtgcttctgttatttccaaacaaattatttgtacttaaatcttgagctcatggactgcttctgggagatcttaaacaacgataaatgcgaagtcccaatttgatcttgtgagcttgtattatatataggggttttctgagtcagaatttttactggcaccacattcaaactttggttcagactggaaattacaatttgtttcattcttggtccccaaacagtttcagcttgcctatagtctctagatatccaaggcagactgtcaaatcaaataataactctaagaggtgatttggcccaatctctttatgttgacaaagaaatgtagatttcaaaacattttgaaaagtagaaacaaaattaaatttttaattgtaatatattaatatcataatttcacttaaatatataggcctatttgggccaggtgtgggtgactcacatctgttatcccagaactttggaaggccgaggcaggtggatcacttgacgtcaggagttcgagaacagcctggccaacatggtgaaaccttgtctctactaaaaatacaaaaattagccaggggtggtggtgggtgcctgtaatcccagctactcaggatgctgaggcatgagaattgcttgaacctgggaggtggatgttgcagtgagccgggattgcgccactgcactccagcctgggcaacagagtgagaccctaactcaaatatatatatatatttatatgcctgtttgtacatgtgtatatactacatattgtctttgtcttcattaaatctgtgaaccagttaatgtctatcacctattagaaaatcagtagatcatgcccccagtgtcacatatattctctgcccaatggttcatttgcttaactgatgaccactctctctaagagctgtcatacatcacataataatgataccttccatatttgcattccacagctatatcagttacctctcatcactttctaacattggccaagtgtcaagctctgcttatgtctactcctattgttggtatattgacattcctttagtgtgttaagaacatgcagtaaattgttaaattaagaacaagattgttattataggcacaattatccactggcctttagcctttgaagcttatgcataatacacaactacatttatttaataatgtttagaggtgttatttgaaaacacaatatcaaaaacaatttattataaattgaagtgatgacaaatttaaatcagataatcagtaattctgaggataaataaatgtaatggcttttaatcactgcatttttatgtttacttaatggagatttttcttctaatttgaataaagtgttatttttatatggggttaatggttatttcttatttgctttttttcactttaaagatatactacagaatttagatttgaaaatattatgtattattacatgaaatcagaagctaaattacaatatgtttctaaagtaggattaatagtttaaatttataaaaacattttgtcttaaaatatttccaaaaagattatgtaacattataaatgaaaccttgagtcttcatgctcattctattacaatgtgataaatattatttatacttgttggtataaataaaccaacttggtacactcagctaaaacataagaagaaagatgatctgagttatataaggaaatattcttcaaagttagaattttaatatgtaaaactatatattaatagagttaatatataccatatattaatacatatttattaatatatagctgttgctttaggtatttaaaatgaaagtgtatttacatttatatagtctacataatagaaaatagaatatattttagtaaagtaaaatgcactattgggcttggtatggatattttgaaggaaagtgtttgtcaaccctaaaataattgtattcaacttagtaaccccagatagtcctttcctggaacagttacagattatagtactctcagagagcacctaacgcagtgatctcatttcataaatgagaaaactggggcaaggagaggataatgactcaaccaaggaggccataggaccaatgatagcccaccttgggacactttactccttgtctttgaacatagcaattctggttctttggaaaagttgtgttaagacaacttattattttcttttaagatcatctgtcagtttataagaagtcaatttcatagaaaaaatatcacattgcttgatatgtgtaaccaatgccaatcacatacatctgatacatttctttcacttaatgactgatcagttattttgatattttgcagacatctaatgaaagggcatcatttaaaaagttagtcttattttctgaatgtatttagtgaattttgcatataaattaagcttagcaaatgatctctttaatgcatacataatattcactaaatgggcaagcaaaaatcaagggccttttagaggacattttctaaattgacagtgatctctttgatttgtttttatgtgtgttattattacctagaagcagatttttttttattttgatggggctaggacttgcctttggaggatagtagcctcactccctgagatggaaacagttgctggtgttttttgacatttcagatattttcatgctgtattagagcttaaccttggctgtgcacacgtctgatctccccaactaaattgtaagctcagtcttacacatcttcaaatccccaaagttccagcagagtgcctcatagttgttcttcagtaaatacttgttgtttatttcagaactagttttaatcttgttttgcaattcagggctttgaaaactataacagacattaggcagaaacttgaaatgctttttatcacttggcacagcattttccaattactttgcaaaagggattgccaagggatattttggaactgtctagtctacaaatgtggctttaaggataaacagactttccattgacatgagttcttctctttgtaccatttgtgttttgccctccttagcagcatctttacactctgggctttgggtacgggggacgcctttacaatatggaagttgccggtgctctttggtcatttcctagtggatgtgtggctttcatagaattgtcacatgggaggccagtttctttggtctcagagaacagaaataggatgacaaaaacaaaagcatcttgtgctttcgtaacttattttgaaactgccctagaagccacatcctttacaatctaggtacaacctacagccttttggtgggacttccctgatgtttgagctgaaagatccttgtgttatgccacagccatattcttcatcttattccaagtctccttctaaggcaaagagctctggaaagcagaagggtcagaattctgggttaggggtgggggctggtgggtactgtaatccttgtttctagcagttgcctcagtagggtaggaagcccaaggggctgtgagttctgggctagtttccagaagagggagagttgtattattaaagtatataataactgctggcagcttgataagaacaaggtgcttgcagagaacagtgattaaggtgatagaggaggcccaccaataaggaacaaggaatgatagcactgtttggagccctgtagggttgctactgtaaaggccttggaccaaaaagagggaaatggacacctaaagatagtagaaagaaaaaagctgaagaaggcagtacagaaagcaaaattcctggactccataatttttccaaggccagaataaagcacagtatagcatttattattgtgggaagtaatacctgaaacagagattttcttaaaggtaatttgaagattagttttgtgaaatacagctctctgtctagtaagtttatatctaaaattagtcgtcatatagtatggaaggaaatgacttcgtctacttctaggttaaaaacagttaaaaaaaaatcagacctttactgataaactataaaagactttttgaaggatgctgaaaaaaatgatgttttcaggtacctgagttgaacaaattacattggcatatactactgacttgttctgtttcagacccatcccatcaaggggctacctgcacacagatctaggtatcttacttaaggtatcataattattgttgcagaaaagctacagccatcttatgaactgtggatgcagttgaaagctagaattctgacttatcatcctcttattagttttgtagatttttgtttggaaattgaaccactgtgattttgcatagaatgtgtttagataccatcactcttgattgaaagctcatactgtcgcttgtgtagagtaggggaaatataaaaacaaaagccaagaattaatatctcaggaatgaatataagaactagctactttaattaggttttaaaaaatgttaatatatttgtgagttctaatccatattagagcatcattaatcctttctgcattcatattgtgtattaagataggtggttgggactttgccaaacttctcgaaattattatactagccaacatatttgttggagaaatgaatcctactgtatatattaaagattcttggctgagcatggtggctcatgtctgtcatctcagcaatttgggaggcaagggcaggaggatagtttgagcccatgagtttgagaccagcctggacaacatagtgagaccccatctcagcaaaaaaaaaaaaagaaaaaagaaaaaaagaaaaaattaggttggtgtggtgttgcacacctgtggtctcagctgctaaagaggctgaggtaggaagattgcttgagcccaggaggttgaggctgcagtgagctgtgatcttgccactgcactctagtctgggcaacggaggcagaccctgtctcgaaaaagaagaaaaaagattctcaaataaatacatttccaataacaaatgttttcatgaaaagccaagggaaattggattgatgctttagatcatttgaaagaattggtgaaatatcagccaaattttgtaaataatttaagaggacatttctatgtgactcatctcagttgttttactctattaaattgatgttcttcccaataactgattggattgattacccttatagatttctgtggatgcttagacttttctttgatactttggattcaaaatcagaggcatcgggtctatagaagcaccatgtcacttgatttccatctaacttccccctgcctgtgtgtagattcttatttgtcagcttcagttgtggaggaaagatctatttcctcttttctgtttgaacatttttccctatctgagctttttaagttttcctttgtaggataaaaagaaaatgtgctaattccctctccatttttccccctagggatgaaggcttgggaataaatgaaatgatttttaaaaatctatcaagatgtatgctttaatttccatctctttatttccatggcagatagctaactgatccttacttacaaaatagcaaaggagaggtatacaggaagaaggggaatgaaaaggtctacctggatgcctaggatcaggttaatacaaataatgattaggtggagaaataattttaagagaatgttcctgtgctatttctaatataatcttggttttctgaaaaacaaacaaacaaaaaaacaaatatttctaaaaagtcaggaaaaaccagtgtttcagaaataatgttaaagtatctgtctatttatacatctacatctatatatacacacatatatacacatatatatatataaaatgatataatgtgtagtgaaattagctttttaaagggatgtcattattattaaaaagcaaattgttttccatgatagttggatagcatttggggttagctgtagtatatgttgggtacgcacactggaaaatgggaggacagagaacaaggctgctgtgtttgccagttgtttagattatataaacatccaatcagatattttatattcctaagcccacccaactgatctaagttttgaaggtagaaaaatgctaaaaggcatagtcaaggcagtatacaaggtcattgttgtaaattaatggcatttattgggaacaaacattagagttcatcagttatcttaggacagcttgaaccaggatgaagtttggtatgaaatgattctctgatcctattgagtatgagtggcttttcagagatgaggaagaaaagactatgtgcagtgtgggaagacaaaatgacatatttggatgtcatcagtatcccatgtgtgacatcaaagatttacccatgaagccacgaccaagaattcttttttgagaggtttatttctgttacttaacttctttcattgagtgatctatagcatcattctggctttgtaaatgatgctcattctgaggttattctgcagtttgtcacttgcatacattttatgcttttacattcatgactgcttttattgcattttaataagtggaggaaaagaacttcctacaacatagttacatttttttaaagatacattcttgctaccaatagaggcctaatttccattatattcactctgctacagaaatacttaatgccaggaaaggagatatttactggaatccacaagtccagaattcatcatgattcagtgtgaaatccactgccctttgctccccaccccctcttggactggaatgaaatgtgccttaaactgaagtgaaatacatcacatgcagcaacagtgggccctcgctttgcctctattcctggtgtgaaatcgatacactatctttcctcctgacctgtttcgtgacctccattgcaactttcatgctgaacagcaattgctttgaacagtctgggtctgccacagctcacaaatgattctcagcttctgtctaaaactggtgctgataacaaaggcttgattttaaataatgcagttgtagtcgtcttctaattatgaattacatgaaagtgcaagctcctctattattaaacactttcaatagcaggcatggtacatgtgcagactgcacacaggggcctggggtctgggaatcaggcctttaaattaatctggctaactttagattgatagagaaggggaaagagacacaaggtatatttgtatgtttcagtcatttccttgatagaattctgtttggtgatctatttaattatttttttccatgtaaggctctactttttccttatggaaatatttttgaataccagattacaaggcctccctcaagaaaaggctgtttgacaaatattttctttttttctttttttttactccagtgaattttattaatgggattccagggttaggctgttaggattgtgactgactagaagtggcagtaacctgcaggggtattccccttttgatcactctgtaactgaatcgggggaaacagaagtatcttaggatgtcattttagctgttttcaagaggctattgaatggaggaatttattatttcaaggaaataataggcatttttaagtatactaagaaaacaactgtatacttagctgacttgctttacttgtttttgccagactagaaatcaaaaagagaactgaagtgctgggtaggagtggaagttttccaaaaacatcttgatatgaaatgaggatcaccacagatattggggtactttatataataattgtgtataaaatgagtcattcttacatgcatttggttagcactattgaaaatggactttgcataaccacaaaatagtctacagaatggcaattgcatcagcaatgatactttaatacccgccccccacagatctacataccaggaggcactaatacacatatgactttgtttattacttcatttcatgagttgagtggaatcatggagggaagcaatgttaaagccccaaggttgtgttcttaacccacccacctctaacaggtatgtggctttatacctaagtcttctaacctgtcactttgcttttcttacatgcaaaatgtggttagtgaatgacatttaacatctttttccctttgcagacttaggtaattaaaacactaataataacccttcacatttgcatagaacttgcatttcacagtgatgtttttcccccaagcacccgaacttctcaatgaccctgtcagacagatggcttgttactgttcccaatttcttgaacaggaaaccacaacacagagtagttaagtgagtttgtcaaggctgcactgtactacgtggcagaactaaaactaaaactgagtctactgactgctggtccagagcttattggtgtggaagtaggaggtgaggatcattattagtattggaacttaaaggcaggaattagctataatagactccatttcaaattgttgaaatcaagtaatatatttaaaatttaatacatattaatggcctctagtgatttgttcactgtcctgtatatctaatgaaaataaggtgctatctcaggacagcttcaggtcagttagttatgaaatgtttataagtacatgaacatatttacttccctgtaccagtaggaaatgaaaagagatatttatgaaggtaataacacacagtcaaagcatgaccaagagtttactaagaccaagaaattttgcgatgatgacaatttcttcaacagatataatttgaattagcaaattgaaagttctcaacaacctgtcatattctttttccaattacataccattttcttcttgtgggtacacataaaaagtgtttctcaaagtgtaaattaaaaatggtgaggtacctgtgaccatatattagccaaaaagaaggaaatactgttaccgaaacactaggggtttggtctaggtccctttgcttgcttgccacataggaaaccaatcactgagacaagtattgccagggaagaaggctttaattgggtgctgcagctgaggagatgagagatcagcctcaaatctgtctcctcaacacactaaacttacaggtttatatagcagggaggaaatgtaaccatgttttggaaaacaggaattagggatgggtaaggaagaggagttggtcaacagggagcaggtggttagttaggcagtcatgacgggtgaggagtctggtgtctcactgtccagatgtggtgatctggtgagtttcagttccttgataccatcttgggaagcatgagagttggtttcctgagaaaggaactcagataagacaaatataactttctcaagttttaagactgggagggttaacttctatgtttattaaaaagaaaccataaatatcagttctatggggcaattgggccggtttcagtaccagatagaacatgaacaattatatatgtccacatcctttacaggtaaaactgtgggcactgagtcctggaaaaattttgacttcccattattcctccatgcagcacaattcctgttttactaaggcttcctcagtgcacctctggggatattccaactagatggtttcctaagttattagaaatcacatatggaaaggaaaagagagtggtggtgaaatggatgtttgtttcctgggtgttgaatcctctatttagaagcacctgtggatgtatagatatgtttcataatgggaaagacgaatatgttcaacaaggacttgcccacccaccaggtatataaggaattttcatgtcattttgtgaaattttattaagatagaactatctattcaaattgatgtagaaagctctgccaaaataaaacctttgccaaaatatcaatgcaattgaggcacatttcttgctctctaccccattctatttaattatgtccattattgtcttaattcttcaacaggccacttcacacaaccattgtgaacctggcctcagcattaatattatccttgatcacactttagcatttcaattttaaagttccaatttgaaagcctgctatttctgttaaaagtttttccatgaaaagagtaaatcttggctacaattcaacggtaattcagcttaaccaagttaagaaaagccttttattcacagtgtttatttagagacagttaagtacagaaatgtgggttctagagacagaaaaatacaaacttttatagagagccatttttttcctttaaagaagacagtgctaataaatcttgttgaatcaagaccttgaaagaaactgaaaatatgtacagatctcaaatatacccaggaaaagtactttatattatcttgctgctgctgcttcataatgtagttttagttgaatgtaatctcctccactcaaatttatttttgagaaattgccacactgaaagttaaaaccatttttgtcattcaaaagaagtagaagatcaatactgaagctctcctatttgttggtacagtctactttaatgttaaaagatttatgataagaacacatttctaaatacatattacataccagtggtacagtcaaacctcaaaataaaacattgttttttaggagaaggaggtggtctatttattattgaaatgctatactaaacgataattcagtgatactttattccaattaaattctccttagtagtaatccttttttatgataagcaaaactgaataatacaaggtatgttccctccaatgaattgttgtgtaacaagacttgatggtaattctaccttttccaaaatctgatatcaggcaatttatcttctaaataatactcctgagtaccaaagctgaaatgttttggcttcaacccaaatgaaacttgaggaagcagattctccagagcatttgcctaactctgtaaatttaattgttataatgaatagaatacatgtgtcaagactacttgtggttctacctgtttacctttcttcctaagacagaaagaacatgacaaaggctgttaactcttactgcagtttgaggtgggaacaaagacttacacagcacaggattgttaaatatgaactaattttaaaggcccaattccagttaataatcagagcagttcagatttaaaaatgtattgttagtccacaatagactgatggaagttaaaaaaaaaaaacaacttcccaaatatttgtctgtaagacacaaaatcttcagatgaaaatatttgcatatccaaaggaatatcatccagtactctacttcatagtagttacattgcctcaagtacaatttcctttctttcacacatctgcaaacatgatatatttcttacatttgactcttatgtaatatttgttcatagagtgaaatccagtgtagtacttggatcaaaccaatgttagtatcacttgcattcatgccagaggtcagatagaggtaaagctattacttttttgtcaatgatgttaaaaactgaaaagatgatttattgtggaggaggccaacgttaactataacccattgccatgaatagtcatattaattttcataaccaaaatgatcaacattaaataacaactgttgctgattgggggtaatttattgaatgtcatttttgtcatttcttttcctccactcagttgtagttagttctcagtcttcattactgtgatacatttgaaccacggtttttagatgagggcaaccattgtattttgctcatacttctattagacacaaaggccatgcctcttgaaaaacctgaacatttttttttctaatggttaacattgcatgattagtgtggagtgtgagctgatggatgtgtatagcaacaattcttatttattttcagacaatttagggaagtctgtgtagtttccaacttgatttattcacttaggatttattaagccacaaacttgtgccaggctttgtgcaagacataggatatgatgaatttctgccttcagaattctaagagtgagttagtttgttttttttttttttggcggggagggcagaagagtaaacccattgaaatgacctgtgatgagtgttgtgatcgagatgagaacagtgggctctgggaactcagaagaagggtacatgcgccttgggaatctcaaaaggagttggatatgtgtgtattagttaggaagctaacaggttgtagcaaagtgactataaaatacagtagccacaggaagtttggagtttctctttcatttatcagcctcaggtgagtggcccagttgaaggtggctctgttccacaggttccttcagtttccagagcccttctcttctattgctctaacatcagcatttttcttgtctgcatggagaaagctgaaccatagttactttgacacagcttgagggaaggaagagctatgagggagcccatacccagtacattaaggcccaacctggaagtgctgctcatcacttctctccccttgcattggtgagaatatagtcatgtggcctgtagtcatagctgcaagggaggctgggtatctaattacaactctattactattgccatcagtagacagaggccagatcaccaaggatcccagatgtcatcctgaactaggaaaaggagttggaaagttgcctattttccatctgtatctttatttctgagatttgctggagaaatcttagtatttgtttcctcctccccacctttcaaatcttaaactctaagttgtgacctgctatgaagtgttatccttccgattagtctttctagagggctttacattttgtattttgtttttgttcactatcatatattgatttaattcatttagtaagtgaccagaagcctcttaatcaagtcagatagtaaacgagtattcctgctaatggtagcaagtatgccattacttcaggttgtattgacatcttgcattgatgaggctggtccattttactctcaggttttaattttcattttagtcaggaatgttgttaagcttagttcaactggcaagagggctgcgaagacttttatgatcagttctaatttgagttgatggtatttttttcagctaaaaatagtatggggtaaaggcttaacaaagatcctctgattagttcttaaggctatgttggaaatggttagagtaatagctttatagggaaggtacatttattttcagaacctttaaattaaacgagaaggaaaccaggctgagttgactcttctgagcctattctgaggtggttttagatatagaggatctggaccatatggagaccaacacagacctacttcctgtacacgtcactgaccttgttagttttatgacagtttttagaaaagcagaacctcgactagagttcacactttttaacaacagaacaaaacaacaagaagatttattagggaaaaaattggtggtggatgaaagataacactcttgtttctgatgcaggtcaagtaaaagtcacgagcttggtaaatcctgaaaggtatatgtgggtctgccagggaagtacaagtgaggaccattgtaggagagaaaatggcatgttcaaaggcttataagcacgtagagtgtgaggctgcgagtggtgtgggttagtgatgagcaaagggtaggtatgaaaaaatggtgatgtgtgaagctgcagaggtaggcaggagccttgcatgccaagctgtggttctggaagaatcctcagggcagtggtctcaccaaacttgcatttagaaagcccatttctgacagaggtgtgactgatggagtgaaggaaggtgagtttaaatcaggagaagttggaggaggatactgcagtgatccagaagaggtaacctacctgaactaagaatagggcactgtgaataagaagtgactttgccaagatgtaggagacaagtgcagaagggcttggtgactgcttgcaagtggaaggtgatggaagggaagaatcaagggccagttctatatgtgctatctggaagaaggtgtggggctgatctccaaggtacttccagcagggtatataagaaccagttaagagccgggagcagtggctcacgcctgtaataccaacactttgagaggccgaggcaggtggatgacctgagttcaggagttcaagaccagcctggccaacatggtgaaaccccgtctctactaaaaatacaaaaattagccaggcatggtggcacatggctgtgatctcagctactagaggctgaggcaggagaatcacttgaacctgggaggcggaggttgcagtgagccgagattgcaccactgcactacagcctgggtgacagagtgagactccatcttaaaaaataaaaaaagaaccagttagggaggcaaggtgatgggttctttaaaaagatcaagtgggaatatacaggccttgggtttggaactaagatgagagctgactatacagaattgggagtcgttggcatataaggtaaaatttgaagccgaaaggttgaaattagcctgagaaagggtattgtgattgctaaaataattcttaagctacttatatacatattatctttctattgatactttaatagtattaataagccaaccaattttattgtctaaaatatttcttcaagcatatgcaaggttaatcagcaattaggtaaagttggttaggaagaagataattaatatgtgatacccacccagctgaaacccaaatccccattgtgcatgctgccatcctttcctcctcaggacaggagctgtaaagagatcagatggtacccagaggccctgatatcaggggatagaatatggatgtatcttaacttatgcaattggacctgtttaatgatttgtaccggtttctaatgagccttggacacatgttcattcacaaagtaaggtgaaaagcagacagtaaaacattggtagataggaacctaagtctctgaccatttcaagacagatcctgaagaatgtagacaagcctagtagatggtcatcaggaaaacctccaatataaatgctgagctttcttaagcatatagtaaagttttttggttttgtggaatgctttttggtagtttacacaaatgtgaagggtgctgtcctggaactcttacagtgtatggtctatatccagctcggtcactacttttctggttgcaatctgcatgcctctccaccttcctgagtcagttttctcagtggaaggacaagtttgtgctaggtgtttcttccattgtaactctgaaagctatccatctgagatttgctgtataggatactcttttaatgaacaaaaaaggtttatgaaatctgaataatttagggataattatttgcattgcaggtggatttctcttaaagcagaatttgctggtaggaataatagtgcttttcagagatttgacttgcttagagaaggaatttttgaacttggggtcagaagagctgatctgtaaactaggctctactcatttatcagttgtgtgacttaaatgctctaagtcttagtttcctcatttaaaagtaaaatattaataaaatgcatggctactgtgcagatcattttgaaggtggtcaggtattacagaaatgtaagttattcttgcccagagaagactggtcatcctaacctaacatgtatacacataatactttagtgctggggcctactttctgaaaatggcctcctagaggatcagcattgtagggatccacttactacggtgtagcccttaaggacaaagggtgggcattttacactggaaattacttttcctttcctttcagttccctgaagtcaggctgcgccttcagatgtagctttttccccaggcattgttcctgcagttgttggttcagcctcctgagctgctttgactttgggaggactcccaccaatccccatttgcctgctgttctctacacaccctttcaccaccattaacaggacagtgcctcaaaccatgtagaacttgcattttaatgtcttttgtttctttgtgtagttccaggtatggtactggcataatttcatcaaccacttcccagaaccccaaaataatgacaaaatagaggtcacagtggtaaatagcccattttgctgagcacagtcatctcaaaatgagaccaagaacactctggctgagaggtttgacaatatggtgttctaacacttactggatgaaagttccaagtatagtctagtacgcttgctgccatttgctaagagggtgcacagcattcagcatgaaggaagatgatgtgtgtacacgtatttaggaagagaagctttcgatggagggatttcagctcctttcaagacactgatcttcttttacaggacctacaaaatgtagatcaaagccagtcttggggccacccttctgtgattaggagctttctatatctactgaagttataatttctgagtctagtagtgtctgtaggtttcatgaatatagagctatagagtgtagccagcacactttgatatacctgcacaatgaataacaaagataattttcagtaaatgtttattgagtgagtgaattcatagttataatggatacaaccctttatgttgttccagatactgtggtaagtgttttacatcaccatctctaacccatgtgaaataacatttattgttgtcattatagattcagagagccaatgctccctatccgatgtctatattagtccattttcatgctgctgataaagacatacctgagactgggcaatttacaaaggaaggaggtttaatggagaactcacagttccacatggctggggaagcctcacaatcatgggggaagacaaggaggagcaagtcacatcttacgtggatggcggcaggcaaagacgagggcttatgcagagaaattcccattttaaaaccatgagatcttgtgaaatccattcacaagaaacagcacaggaaagacctgcccccatgattcagtcatctcccactgggtccctcccacaacacatgggaattataggagctacaagatgagatttgggtggggacacagagccaaacaatatcaatgtcatatagctagtagcggcagagctccaagtttgcattcacatctggttccaaagcttgggctcctaagcattacttggacatgtctcccaacagatggacaaatgctgggaccctcagacatcagggaggtaagaagacagaggaatagaaagcaggacccatctaattacttcccttttgtctgattcactggaggataattgcactaggttcaaatactttccaagttgccctcttagtttttttgctgcttttaccttaaggtttcttatcatgtaaagcttagtagctttccagaattagcagaaactgcaggaatattttggttagcgctgagggagttctgtaggtatgttacaatctaggggggaaagtctaattggaatcagactcctaggtcacgttaaaagtcaaagtcaactcttccaatcatcaatttggtgcttgggccctgtgtttcagaacctggtcaagtgggtgttcacactgattcaaaacactaccattgacaagaactcactcatttcactcctaactagatttggccagttgggtttttttgttttttgttttaagctggaatctattttcttatgtcttcaacccattggacccaagtcctctctgtggactcataacaaataggaatcatctccaagccaacattttagatgtttgaggcccagcagtcttccctaggtcttctctctggaggatctagttccttcaatgggtcatcacctcccctggctccttgtccctcactgtgatatggctgtctccgaattctgctccatcttatctgcataccttctaaaggggagggcctagaacttaacacattattgctaatgacagaaaaattcatttatgaagcaaatttattctgataaatgttatattaatttaattgccattagagatgatagattatcatgaaacagaagtctatcaagaacatagcctatctacaagaagaatgaaagcatcacagtgaaagtcttaaaagatcacagtgcaaaacacatttcgaatgaaatctcttgttccctgttttcagcctatagtttataaaaatatttgaccctacaatgggtttgctaactttggcatgtaggaggataattactgttattaaaagctaatgtactgtgttctaagtgcaagttctgggctaagcactttacacaattatctctttgggccatcctcagcaggtagtgaagtagatctttttattgttcccatttttcacatgaggaagctgaggttaaaagagactaaagaaggccgggcgcggtggctcacgcctgtaatcccagcactttgggaggccgaggcgggtggatcacgaggtcaggagatcgagaccatcctggctaacaaggtgaaaccccgtctctactaaaaatacaaaaaattagccgggcgcggtggcgggcgcctgtagtcccagctactcgggaggctgaggcaggagaatggcgtgaacccaggaagcggagcttgcagtgagccgagattgcgccattgcagtccgcagtccggcctgggcaacagagcgagactccgtctcaaaaaaaaaaaaaaaaagagagactaaagaacttccccactaccacctactaagtggcagacctgagatccatcagtctcaaaaactctgattatagagcttgtactcttacttgcaatgccatctggtgtaacatagtagtatactcatgttgtttttctgaaaaactacctttctattttgaacacaccacagaccctgtttcgttgcatttgtagctatgaatgtccacatcagaactttacagggcaaaaaattttgttttgtgtgattgatgcagctttcaaattccataaacacaggaaacatgaaaatactagtcactgtcattcagggagcccttgaccctggctatcagaaaacagagaacggataccttggtgaagaaactgtgttttcaaaccctcaaagaggtgaaaactaaaagttatacgtgaaatggttatttagaataccaatttaggggtacaaataaagaattacatttttttgtgtgtgagatggagtcttgctctgttgcccagcctggagtgcagtggtgcgagcttgactcactgcaacctccacctcccgggttcaagcgattctcctgcctcagccttctgagtagctgggactacaggcacatgccaccatgcctggctaattttttgtatttttagtagagtcagagtttcaccgtgttagccaggatgatcttgatctcctgacctcatgatccacccaccttggcttcccaaagtgctgggattacaggtgtgagccaccgtgcctggccatgaattacattttaacctgaattcagtaagatagttcaaaattataagtaggttttgaatttctcatctaatagccataaaatttgcagttcagacacctgtataagaaagtaccatccccaagagtggcaaaggatccctgttgtcctcagaaatgtctttaaaggatggctttgtaaattttaaatatttctaagcatgggattaaaaacagcagtgcaatccttaggctgtcagttgttctctggtagcttatcttccctgatacatattaaataactaccctaccacccccaaaaactactctgaccaatcaggaacagagctatgtgcattataatggggttgctgggggatatgagagaaactgcccaagtccaaaggtaaatattagatatactcatcctattgtcttaaaacaatacattaagaaaaaaccctacatattaattcaagagaatggccagcgcttatgcttaataactagaaaataaaaccctttaaaaacgttgcaaaatatgatgtgttgggtttgtccctcactaccaggtggaactcagcttagataatgtatttcatccttgctcttgtttctaataatactgccagcaaggggagccagtactggccacatttgctccaggaaataatcccctttgctactacggtggcaatacctaggcacaagagggtgagtccatggcaatttcttacttctggttttctgtctataattttgaatttctttgcttttgtgattttcaagcctgccatttatattacttgaacttttttttttaaggaggtttaatatcttacttatcactgaaaaccagggtccagttagttaaggtttcagttgaacgtgaaatgtgacttcctaagcttgtcatgcatcaaactgttatggctggcaattgtttaaaaaaaattcattttgttatgaactagcctgttttcaactgggctgttcagagatggattgctttctggagtttttgacaggtgtaattgttaaggcgtcatctgttcttgtttgcacaaaatacattttagccaactgtaggacttgcccgctaatctttctcacatcattccattctttgcttgccactagacaaatcccctgttatttgaccagatggtggaaaatccattctcatgataagttgcttctagtttgcatttagattacctgcaaaaatggaacaatttactactctgcctctaaccatctctttcctcctttttcccttagtttgacttcttgtaactaattatttaaattctgccctgagttaaaattagtcatagcttacatgtttcacatgtatgtaaatgcacttaagtcctacctcaagctgtatgatgagtccatctagacagaagtgacaggaagggaagggaatgtggattgtttgataggcagaagccacagtttataatagtttcacgattgaaaggcatatttgaactttttcctggcagtgtttaacctttaaaaacaaaatcaggtggagagaatgaactcagtagctttttgatgataacatattgtagcaagaaaggtaaaacacaaagtgttaagtaaatgatggtttggggatttgattcctatagatgtcttatctgtaattttttaaacctgacagtttcctctatggtacacaagatgtaaatgaaaattacatcataacattttctgtcacgaacaaaagagtggtagtccttcttttccccccttcctctctacccaaaaccttttctgggtaagtttattttcaaaattattgagagccaggtaacattgactattctttaactgcttcaaattgttcatagtcaaatacttctcagtactttaatttttaatttagagcaaaatataagaaatcaattttaaagcataaaatgacactgaacagagatatagagtatttcagtgtgatcttaggtcaaaccaattcttttaaaaaatctgtaacatatcatctgctgtcactggggctatcacatgctcaaaacaacttctcaggatttgtttttgcaaacttaatggccaaaattaatttgtcaggtgggcctattattgaatcttttaaacctgggcttcatttcaagcttttttatatctcttgctttcttgtaacagttttacaataaaatgccacatgggttaatgtaaacttttgaaattccactgatagttaatgagtatgtttaggttagaagttgaatacaataatcaacatggggcttaaaaatcacttaaacaaggggtaaatggttaattataaatagaactgttggcctacagaatttaatgagagatttgagtatacatatactttatatataaactatgtatactttatatagtttgaatataacacagagaatgtgtttaaataaaatcttattaatgcagctaaataaagttcaaaagtagaacttaaattatttgaaagtattgtcacttaatatgttgggctttatgaaatattaagtaaacttaaaaaattagaaacatagaaattagaaaaaacttatctgagttttttttttttttttgagacggtgtcttgctctgtcacccaggctggagtgcagtggcaggatctcagctcattgcaaactctgcctcccagattcacaccattctcctgcctcagcctcccaagtagctgggactacaggcgccgaccaccacgcccggctaattttttgtatttttagtagagatggggtttcaccgtgttagccaggatggtcttgatctcctgacctcgtgatccgcctgcctcggcctcccaaagtgctgtgattacaggcgtgagccaccgcacctggccttatctgagtttttataaagtagcatgatccatcacatgtttttaattaataattaagaagatattaagtatctactggcttagggattagacattatacttttctaatatgctggtattagagcgaaaggattggtactcgtactgatattgtgtattgattaaatgacattactttcctctaaattatgaaatgatagattctttaaatacttttttccctgaatgaagggattttcaatagaaggaaatggccagaaaacatctcagcatttttatgtctatataatgcaaggagtctcagatgaatttatatgcttaagtaacacagatgaaaattgtgtaagctttttcccctttttgccttaactgccaagaaacctggagccactgtaatcagttcatctcaggtgcctgttaacatctaacccgtgttcccgacggccttgcttgtgttttcatccctaattgggtttagttctgtaagctgaatcgcattcctttataagtccatagcaaactctatataaattgaatagagctgaaaaatatattaactcgaccaaggttttatagctaatttacagttgcctacaatagtaatgcatgattgaactaatgacagtcctataacaaaaacactaatgacatttgtttttaacatttcctttagaatataatcatgggaattgaagagtgagttaaggtttagacctatgtctcttttcttccacttttatgactctgagatttaaaaaaaaaaacaaaacaaaactgtcctgataaagaactgaaaaagttgcttttctctgactgcagttttctaaaagtggaagttaatgttctaaaatgtatgtacacattgcaattgtgtgtagagctcaaaagcgtaaaaagcaaaatatattgaatttcaacatacttgttatcctgcattccagttgactgtagagaatctctagtcatgtctatctgtttttgatgcctctacagaataactgcccagcatcctctgcccaaccaatcagaatgtaggaaaatctacagatatgacggaatctactgtgaatctacctaccagaagtatgttgaaatctttgtgagtcttccttctggctcgtacatcagtgcttgtggttgccagctattcaaaaatatccttgtattgaaaccttctttttatctaatttagtgggggagaaaaaaaaacaaaaaaacaaaccaacaaaccaaaccaaataaaaacaaccaaaacaatttgcctctgagatcaagacagaaaaaaaatgtttatttttttgaaattgtggtctaaaagttttttttaacgactgtattaaagctcttaggtaagcttctttatattgcaataaacaagtacttatatgcaagaaaatctcggcaaaatacattgcacaggtgctacgcatcttagggatttgaaaggtgtgttatgtataaattagctgtcactttttttcaatcctgtaatggaatgatgagttgtaatttgcataatcctttaagaagtcaaattatactgtcatgtagcagacttaacatgctagctaagatttcagagctttgcagctaattactatgtaccttacaggacagttaaattgaagttgagtcctctgtctttgctgccatttgctttgtccattacttaacagaatctgcactttgggtaacgaggtgttgttactatcactgaagtaaacactctgctctgggaggaaatggcattttaatatatcatagttggacttgtattgcttttgctgtgaagaaagttttcttcaaaaacagtaatccaattggaatcttccccaaaaaagatgaaatttatgctttccataaaagttatgaaatattgattgaagcaacattaacctttaattaaattctcctatggaaaatggaaagtaatgtaaacataattccactgaaggcattatgttttctggatatactttgcaaatatactttgttgtgtttttgtcttcacactcttaacttcttttgtagtagtgtgactattgaacaataccatttttttccttaaaaaatcctttgtgaatgcaagctggtgagtcctactttcatttactcctccaactggttgtagagcactttctttcatggtttccatttttaaaaaatcagaaattctggtggctgtgaaggctgctctctgaaatagacacaaagtggatactggatggagctgggactgttccctacctagcatggtttaggtgactgtatcactgtatctttactatatacatgtagttatctctggctttatttattgatatttcactgtctagatagtgttactagttttatccgaactggtataattataatgcagaattgttactgatcatcattttaaaaaattctttgttatctgtgagtcatttattgtggctcttggtggccaggtttctgtaatttgttagtgatttgtggatttgttgtatactttgaaaaatccttttgttgtataagaagagggtcctttaaggaccaaattaaagcaggatttgattactgaccattcaaataagtgcatatcaacaatcaactgttgtttatttttaattaagtcagtttcacgtgtctgaaattactgttggcttagaggctgagatttgtcaattaggagcccggatggggccaccaggaatttggcgcatagtaaggcttccctgctagctgtaggaatcatctcaagggcttgctttttaaagaattggtgttatttgtagtcaaggtagacacagtaggcagcacagctgtgactgccagggaaagtcactatggggatattcataacaaggaaatattggcaaataaatgatgaagaaggggaggaaatccccaagatgttgaattggagtactgtcactgagatgattaatggtgttgtgtattttagtgaagatgcttatctgaattgtcttgaaactatagtgtacatttaatagcacctataaaaaagcatgtggtacacaagcacactgaagagaaaaggccgggtattccgattttatcttcctattttctccaattaagtttttggcttctgtttattagaaagctggtgttaatatatattatataaggagtatgtttattctatatatttattactcatcagcatttatatagctactttccctagaagattgaaatgtattgtaaaaaaaaaaaacatggatagtattgtaaaaaacatgggtagtttttccacactcttgttgggtgaatattatcaagagtagggagatgtaggcaaacagtcagggtcacagggctgcagtgagtaaagggctacacttttatcaatgatggagtcagtacaattttaaaaacatttctacatcaatttctggtgaaggggtaactgttttggaagatcctctagctttcagtgtcaaaccataaatttcctgattctgtggtgtgaattatcacttgcctggagggattgttatccatgaaagcaggtgcatctttgggcaagttacttaatctccttgggcctcagtaattactagtagatataggaatagatacagacaaatgacatatcatccaatcttcaatgagcttatagtctattacagcgacgtttttctaactcttggttactattcaaacagttggatatgtatccaatttagtggatcaagatcctaattttaaaaatgaaatggaagagaacagaaaattttattgtattgcatttcagtaagaatgtgtcttattttgtgaggctccctttttagtttcatatttgtgtatgtgtacatataactgcacatatgtgtttactgggtagatcatgaggtaatatgtgtttctactgtgtttcatatccaaaaagaatggaagccactgtgatagagttgagtaggtaaatgtataaacagaataatatataggtgttgtcactttgtgttcagggtacactggattataaagaaagaaatggtcagtcttatgaaaagggttcaggaatgaagaggctacgctgtttggtctctcatattcagggatgtgctagagccaacttggatgggtttgtgagagtcaattgtatgcacctctttctcactttgttagttctggcctcacgttagtaacttgaagttgcagaaagtacttgcaccatggaaattggaaaatattgcaattctggtgctctctaagccccaagtgattgttatacatgtaccagcatgtcattgctcatatttgttccaactataattctatggttttataattattttgaattacatatttaaagacattattttctatgttgcatttagattttattggtaattatttaaatgattagacaattgtttcaataatgaaagtttaaaacaagcaggaatataaaacctgtgattattttaaaacgtctataattagttccaaataatagtaatagttactctaacttctgttaaatgcttattatactttcaatttaaaatttcaagtttaattggtaagatcaggttctttggtaaagggtaggtatatagtgttttaaaaaatacacctcatattgtaaatattttacaaattgtatcattttaagttaggcagttattttgctaagtattacaaattttgggcctcagacccctcctttcctttttagtggtcttttacagtttacaataatgtctgtgttttcgcaaacacatctgtaaagtagtggatttcatcagaagatgcaaaagttcttttcaaattaaaacagttgtcaatcttataaaaatattttcaaatacaaaagtaaaagtagcatagtctaaaataggagaaaagacaccccttccatactaactataactttgaactttattgttttttatttagagacagggtcttgctctgttgcctaggcagtggtgcaatcatagctcactgcagcctcgaactcctgggctcaagctcccaagtagctaagactacaggtgcatgcccccatgtctggcttttttgttttgtttttagtagaggacaaggtcttactctgttacccaggctggtctcgaactcctgggctcaagccatcctcccacctcagcctctaaaagtactggattcctggcctgaacttgaaagaaaatattgggtaagtcagaggaaataaaatattcatagacatgagatggaatagtagtagtaagttcaaaggaaatcacctatattaagaagaatatgagatagtgaggaaagataagtaggaaagagtcaactgagctaggtgtttgtagcttcaaaacttaagttgcaattcagccatatagttggacactgccatagagggatttgaggaagagtggggtgtctttaaagccaagaacaatccgttcacccgtatttagaaaagatggagtgagtctgagatggcagtttcaattactaacgtttattgagcacatgctatgccattgtaataggcatggcagtacctattttaaacaacgaggtttaatccaggattcctagactccaagtgtaaccaagattgagaagccctgattgagaaggtgtttgtaatggatttagacagttgtcattgaaagcagaagaggccattggcaaaattgtaaagtttgtctttgtttagctgtcttttccatcctttggaaccccatccttttccaagcccctttttctcctttgtgaaattcattccacctggatgcctggttagtgtttcaaacctgtgcctcatcggcacagagttgtgattgtctatagccctcattgcagatcaggtgttgttagctgatggtgttactgttctcaggacgatttgccttttcataagcaactccaggtgaacaaattcaagaaaatgggtagttttttccaacagaataatttcagacaccatgacagggcttggataaattcatatggggctagaggaaagtttctttcttcctgaaaatacaaatccagaatgtgggtactctactcagtatatagtgttaaggctggccttggccaagaagcgtggatttggattcacaaccaaaagagggaaggaattaacaagttccagggaagagaagaggagaatgagtgaagaaggagggaacgtgccagtctttatcagctcttttgtacaagacagagtgctaaccactttcatgtgttatcccaattaaggcgaacaagacaggcgccttgtcagggattctgctggggggaggatggtcacctatgctgaagaaaagggaaaggtcacggaggctccagcagcaggagtgaattcttttgctggttgtttaacctgattgactgattgctattatacagtcatcttcccctcacctgcacaatagaacaacttatgccagttgtgttaggatcagtaaataacaaaggattgagaaaagagttagaaatataaaatgaccttcataaagagctctaatgctaaacatgttaaacagacattgaactttgtagcaagaactgcttcaagcctttcgatatccaaatgaattctaatttccacatcatgcctttcagacttcagcatggtttctggtggtttctcccagttaattttagcatcacacgaatgcttttgcctataaatgacttgaagtagcatatgttggtaatgtggatggcatgaaagtgtattatttaggggttattctagactagcctagaagtgagtgaatttattcattcatttaacaaatatattttaatcatcacccacgggtcaggtgcttttctacacgaactgttctacactaactgacttattcagaggtgactaagaaaacctctgctctctagaagcctagaagactgagatatcaataagtaattgacattctgcctggagcggtgcctcaggagaaataagtgtcaactatggaagcagcaccacagaggggccatttttaatagtgcagggagcccaaggtcttcatggtggaggaggagctatctgagcttgggagggaacccgaggtaatggtttgggctaaaaggcatttctggtgtggcaaattgcaaaggacacaggcagaagtggagggctggggaacggtgacaggaggtgaggctggagaggaagggagagcagaggcctcagatcccagaggactgccatcctgggagagccctggcaggagttttcaggagtgtgacagagactgcatcttcgagaagaattaccctggaggtggattaggcctgaggctgctgtgggagtgttccatagcttcctctcctcttctttgtttcacaactcttgtaacttgctttgcaagaaggaatgtgatctcattgttcaattcccacctatgaaaaaaaaaagaaaaaaaaaaagaaggaatgtgaaattgtggtgtttgttagtttaaagttgttttttattgataaatatcttgaaggactctcccaatgtgaaatccggttcaggatctgtctgcaaactcattgcttttcctggcttgaggtgcccacctctgcctttctcctcacagaccacttgtaattcaagataaacgaatgccagagagtaaaaatggataggcgcaggcagcatgatttagaatgaaagaatattaattggtttcaccggagtgtatattttcattatgagagaagtgactacctagattttaaaaaataattggttggtgacacacctgcagtgtgcatgtgacctctagaaacttgagaacgaaagtaaaggtcaagatgagaggtgtagcaccacaacgagccttttgtaggcacgctgttgaacagcggcgttcaaaaatcgctaacaggtggtttcagaaagtcagtgatactaatgtgcttgtgtccagactttagaaatactacagcaaacttaaactgtggtttcagtaaattctccttaccttatgaacagcttcttctgtgtattgagtttacaaatgtgtctttagtgaatctttggacttagtttatgcattagagtataatcattatgctttgttctttgactatgagcaagctattttaaacaattaagtccatgcagtaatgtttagtcattgctagcggtggttaaatctcttggaaatggatctggctttgatcctagccccacaattatctgttacatgtgggacagtgactaagttgcttaactttaagcttctgtttgcttatctctaaaagtaggggcaaaacaatacctcagaggttgttttgaggatgaatgtgatgattaggatggtgataataatgaacattactgatcttttaccagatgccaacgtcaggcactgggctaatggcttaacatacatttaaaaaaatccttacaataaacttatgccttaggtatgattattaccacattttacagataaggtaacagaagcttacagagctgacagaactaactcaaggttaagaaggcaggatgtggtggaattaagattagtatcagcaaattatgatccactagccacatctacccccaaccccccagtttttgtaaagttttattggaacaaggccatacccattcatttgtggtggaattaggattagtatcactgaattagggcccattagccaaatctaccccatccccctccatttttgtaaatacaattttattggaaaatatccataaccatttaggtattatctgtgactccgttcctgctataagagcatagttgatagtagtgacagagaccatatggcccacaaagctgcaaatatttacaatctggccatttatagaagtttgctgacctccgcattagacctcaggctatctgacttcagaacctaaggtctaaaccataaaaacactaatcatggtgcttggcatatagtaaacatacactaaatgagtactaccttgttgctcatctaacttactatagaactgttaacctcgcagaattagtatctgcaaaatggaaataataagcattcaaccgccagcaagaaaagtcataatgactatggagatgttgaagaacttaaagttccaaaaggaacacacgctgaattatgtgttatagttgttgtttattactatgctttatgtaatataaatgagaaattccattttcacaccaaagtacagtattgccttaaaggagatcattgtgaattttagtgactattcaggatatctattaaaagaaattaatttcatacatgagaaaattttataattttaggaaatttaaaaagtataattttccttatgaaaaatacatattatcaaaaaaacttacagtattatgatctgtattatttaaaaagtatataagcagtatctttacaataagaaaaatatgcagcaagacatctcttttaatgagaagataaacaattaatatacctcccttaattgtcctaccagcaacaaaggaacgaaattatggtttccactttaccctactcataacttttatttccatatgtttttctgttgatttagggaattccctgtcctctgctctgtaaatggccttggatttgtgttaccttggagctcacagagcaggctttggtgggccttcaacttgtgttgagggaatattcttggaatttctttcaccaggcccaatgtcatgtttctgggttggtgagtggtgggcggggagggggagtagtcgtagattagttacctcatgacgtttatcctcttcccttgcaaaagctctttttgaatagagatgcagtacattttcattctggaacacttagaaaacacaggtaagcataaagaaagaacatcaatgtttttgtaattgtcctacccacagatcaccactgttaacaatttggtggctatccttgtagtcttctatacaatggtgtgtgtttctatgaataacactttttatagatgtatatccatgtatataggtattttcttgtgaatccatacacacctgactcggctgggaaatgtctgggacgaggtgttctaatttgtatatgagcagcttatttgggggaagctggaagctacatggtcagtttccatagagaaactgttccacagagatttcctttttgatgtgacacttatatttttcctggtgttgaaattcaggatttttagcacttttgttttcaaaagaatttgtttgaatttaaattcaagcgagaactagtgatatactcattagtgataggattttcagcagacaaatctttccgtaccaccttaatatttatttttatctagacatagtacacatttaaatgtggaaatagttttgcagttatagaacgaagctagtggtgagaaaggtgtggtgagaagggtatggtgggttaaagaaacatacggcttttttaggtcagatacatccatgtatgaaaagttaaacgattagatggagttttctggttgctttccaaactcatcctgtcacatattatgtctgctgcattatcctctaggttgcttaaaaataattttatttactgtgtttagtattgagatgtttaggtccagttcttaaagcagagagagggctgggtccttcgaggattttggtttagtgaccagcatgcaacggaagcattgttgggttattttttcattggcaaatttgagacgttgtgattcgtatatcaatttgagaattctttggaattgggtgcttgggatttatgtggttaaatagactatcaccacatcttatttaaatcctaatttccctgtccctccctcaagccagttataaaggatctctgggccttgctctttgcttgttctcatgtgttaccaatgagaagaggcctatttctcttactagcaattcccattacttgcatttcaaccatcataagctttcataacagcatcattttcctgactattgcctgtcaggggtgcttacagtgaatcacagccaactgcatgccttggccttgacactggaaggtatacagtctttttgatgattcttctctttgcttcctctcttcaactccacttgaaaaactgttttaggagtaaaattgaatgagcatggcttggttgggcacaaagcatcctgtcctgtgtgcttgaggcaccatctggatgtcttggtgaagaatatattttatgtagttgtaggggagatccttgttcacttccaggggaagcagcatgcttttccagagactcccttaactgcctgatggctcacaagcagaaaatgagaagcagcagctcggcttctcatcccctggagaaattcatcaggtgttctaagtcttgaattgctatcagtgaaaacaatggtattcatggcaccacccttttaaaaggagaggtttggagaaacatccagcggagatgaggatggaaggtcgagggcattcctgaactcttgtaaaattcatggtcaatacattcatctgatagcaagattgtttaccctctgttctgaatgctgcttgcccagaggtagtaacaatttatatgatgcttgtaggaataaagaatgttgtgttttttattttttaatttatcatggtacttgggaaatgcctcagggaagagaagactagaaaactaaaattatgggccagcagattttaagtagagtatgtttttacaagagtctggtggcaagtttggttcacttgtaccacaaatacctttattgggtctgttcaggagaaatttgcaggacataaatgtttgctgtggtacagagtgtcctgagaatgcaagactctgaaacagagacaggagaatgactatagccacatttattctgccgtcaaaaggaaacattctttgatgccagggccttttattgtgaggctaagttgatccttctgggacaacagaagcattaactcatgacggtgaagttacctttcaggggccccattcctacttctgtgttggctggttttctatgtgcaataatgcatagactgcataggctgcagtaattgatacggctgaaatccggagaaaaggaaagaacatgctccaaatatggggtgctgtggtcttcaagcattattgtaattgacccaagcaaccatgtttgaaatagacaatattattctgagtttgcactcgagacagtggaagctcagagaggtcaggcacattgctcagttcacacagctaatgaggtgcaatctggtaactaactattggagaccctctccggtctgtgtggcccagcacttcttcccttttcaactggatgacagggtcccttggagcaggatgacactttaccttagaaaaacatccatcctctatttgaggatggtctgttgaaatctatttctgcaaaagaagaagaccctaaggaacttgaagccatgcccatagaaaaattgaggtttgccatatttgaacatcagtcatttaaagaacacacaaccagtgtcctgtgagtgtaaagctgtgtactctccagcatgggacaattaggtctcccccttggggatttcatctgtccttacactgtggttatcacatagaaatggatgaatgtcaacttttaatcttaagccctctttccaaactctagttttctattttcaaactacttgacctttgcattgtttcacctcacaacaatctccacatgtaatgaccaacaagcttgtaagcactcccatgagcattcccaattaatcctcaaagcaacctagtgaactgtgttttgtctgttttacatggagaaaaacaaaaacaagcccttgtattacagaggttaagtgattccaagtatttcacacagctcgggtgtaacatggctggcccacagattaagacctctttcatctcccagtttagggccttctccaggacagtgccaccattactccaaaatagaacttggggtcttccccagaaagatcctctcctaccttgcacttcttttgctttatcttcatttatatagtaattcagtctcattcttgacattatcttttattctgcctctctcttgtctcaaatattcttttagtagcatattttcttttaaaacttcccttcttttcacatccccttaattcaagctattatttcagcctagattgttgcagtctcctaactagtgttcttatctcctatcttactcagtttggttcagataaatacttgagtcctgctctatgcaaagcaccatgctagggaatgcaaagattttcctttctgggctgcttcataaatagttaccagattgaaatactgtttctaacatattttcctgctcaaaatcactgactgctccatctcacgtcaagctgtctgtaatcttagcttagtgtttaaaacttaccagtgtagctccattctgcctttcagcctccctataacaccagacatttcttagcgcgagttctgtgctctgtccatgaaacatttccattcattcttgttaggcacaacacatgcactaagtccctgcctttgcttgctcctttgtaaagtctttctaaccttgttttatccacagtggtttctctcttctcttaacacattaattgagtaccttctataaccaggaactattgattggtatatatcagtggacaaaggccataatctttgttctcaaagttggatgattctcaaagttggatggcattagaaacagccactaaacagcagatgttaaaaatgaaggaaatcatatagtctgttacatggcagtcagtgcagtggaacaaaaatacagaaggttaagaaggatttaggagtcctggggtagaagtgagtcattgtggttataatagatggtgaccattaaaagaaagatgacatttgagcaatgactgtaaggaagtgagggagttaggcattcacatagccaggcgaaaacattccaggtagaatggacaaccactacaaaggcgctgaagggttcctaatgtgttcaaagcacaccagggaggccagtgtggtgggggctgaatgagcaaggaggacagtggcaggagacaggtcagggaggcaacagcacacgggatgctggcgggccagggagggacttcggcttttgttccactcgaaacagagtcttgggaggattatgaattgaggagaaatgagacctaactgattttagtatcagtctagttactggctgagcatatgcttcagggggctgagggtggaagcaggggacttagctcagaggctatcagcataatcaaggtgtgatttgtaccaagacgaagtggataaagaagagagagagaagtcgatattgaatccaagattaaatactaatgtatcattgactttgtattccatgtggtggcactcaatcacatgtatgcaaataagtacctttccctcgtaaacttagagatgaagcatgacaaaaacttataaaagttaaatggtaagaggctatgtgtatgtacggataatatcttctcaataacattgcaagttccttagagatatttattcatttattcagtccacaaacttttaaaaaggtactcgttaaaggccaatgattgccttgcatttgagcagtgcggaatgcaataggagaatgtcagtgtggtgggtaagtgtgcaggctatgatggagacggatgtattcaaaccctagttccattacttatttgctgggtgatcttgaacaagttacttaagctgcctgtttcccacctttctcatttgcgaaatgctgatgatagtatctcataggattttctcttaggattttccatagggattaaatgaactaatacatgtaaaatgcttagaaaaatgcttcccctggaagtgcatactaagtactcaactactaactcaaaaaagttagtgctgtggaaaaaatagctaaaagaggatttaacatttagagtgacttttcacccctgtaactacccatgttcaaaacctgtcaagttacctggttaatgaatgtgaataataaggtctcatagtaagccttgttctctagttgatagtttaaaaatgacagagaattgcattgtgattagtctgattacgtgcctctttttgaaggtggacatggaagctggtcagtaacccttctgggcacattttgattgacagactggcaaacagcatttaaatctctaacacataaaaaagatcaatgttttcttattattttttagcttaaaatgttgaatgtgtattaaaatgagaaaaataattttcaggatagatatgactcctagtacataaaagcaaggagatcacatcaaggagggaatattatttttttgaccaaatacaggaaattactcctccttgtttatattatatttataaaattctcctccatgtttatattttgctacctaatatctcctttctttttttttctttcatgtagttgttgtttttttcatccctcttattatcagcaactatatggcctccaaatccaggaaagagcagtgcattgctactgtggaactcatgcggacatctttagtgtcagaggtagtttgaagagcagcttaattctgctttcattgtgcctggtacttctgtgaggcactcaggttctgtctgagctcagtattactgatcccatcctatacgtcctagatggcagtgcagacagtggctgtcaatgagtaacaggtaaatattgaacagggaagcccttttgattaactttgtggatcattgtttgaaagtagcgtacagtcagaacagcaccatcactcatgatcatagcacatggcgtaggggtcagagcaccaagctgctggtttgaaagctgagattgcattctttgttctacacatgggcctgtattcatgtactgctggactagttacaactatccagtgaacaaaatgctgactgtttagcacaatattcatgcaaaatatttaagatggtaaggcacaaagaatgcttgagggactttgtgcgacataggtataaatatgttaaagcgtgtttataattgctttttgaagggtttaacactgggtgcttttacctttttatccaggttcagaaacctttttctaataaggaacttagagatgtgtggcaggttgaggataaatttttgctcttattagtatgtactgaaaataagtaattttagcctctatcagttttcctaggtttgttctacgctacctatgggtacaacttacccccatgacacatttacccaggaggttggtccatacctgatttgtcaagtgattcattgaacctcatgataagttaatggtttatcatcattaggaacaatactattatcatcatgattaatatttttgagcaaccatcaaataatatgcatggaacttgttaaaaggcataaatgaggttgcatggaaaagaacagctttctgttctcaaatatttctaaataacacttacatggtcataaaaaggcacagataaaacatgattacgctgcttatgcatttctaggagaaacttaattcagtagtcaagtaggcaattccaaaacgttttcataagccaaagattttaagtaaatcttttaattgagacttttaatcataccgagctatagaaataatattcagataattatgttcaataattaagatcatcaaaacaactaatcattaagattattaaaacaaagctaatctacatccttcctacccatattctagagcagtgggtaaaaaggtaagcattttatggcactttaaatatataattgcaacatttactgtttagcatatacgaaccacaaaagtgacaaaatctatatccagtgtgctggataaggtcttaattttatgtatcacttaagtgttaaatttatacaacctagtcaaagtggtaacagccccacaataaagaataataattttattctggaaaattattcaaatgaaaaaatacaaagtagtcatgctagttagagctgtaaatgacatgtttccatcaaatttctgaagaagagattctgtgttttttttcttttctttctttttttgagatggagtcttgctccgtcacccaggctagagggcattggtgcaacctcagctcactgcaatctccgcctcccaggttcaagcaattctcttgactcagcctccccagtagctgagattacagatgtgcaccaccacgcccagctaatttttgtacttttagtagagatggggtttcaccaagttggacagtctggtctcaaactcctgatctcaggtgatccgcctgcctcggtctcctaaagtgctgggattacaggcgtgagccactgcgcctggccagattctgtgtttttaaaagtgtcaactttgcttttaaataacggtggcaaatagcaatattctttcttttaataatattctagactaatttatgggaaccacacttcctttggaaaaggacgtgatttaaaatttcatttagaaaacaacttcagttgttctagtattatcacagagcagtgtattagaaatcactgtattatattttgaaatttagatcaacctataatatgaacacgaaaaacataaacatgaaaatgtaatttaacaaaggtgaatttttctttacgatagaaatacactgaaagcttttgccagttaaagaacagcgtgggctactgtccttgcctctttccctagggaacccaggatctaatctggattagattccaaatgaacatgtgttaggtggtcccatcataaccctgaatggatattttgctacaccacaaaactagaacataatttgacataaatctttgtttagaagcgaaatagcaggggatgctgtgggtcagggtggaactggcagggctgcgtgggaacctgcccacatagcctggtgtctagcagagctggcacttttaggcctttggtttccttgaaattataggtaatgaatttaacatctagtctctctttctctgggacagtaaccttggtacatagtgttctttcatgtcgacttgtgacccatatttttggtatttcatttataagaaaaatatacatatatataatttttaaagttgcctaataattgccacaacttaaaaaaaatttttttactttattatgtttgtaccctaacagaaaatagaatgggttaggcaagcattatttaaatgatggtgatgccatcactgctgggttttaatattccattttaatcactgggcaaattggtcgtgttttatttggggaaaatggaatatgttgagggaggatgtggtcattttgaaagtcatttggtttagttcaggaacaaacactcatttatcaaggaaatatttattgtctccttttgggaaagtgtaggcatcctcagtctcaaagaagttgcatgccagtggggcaatgaggcatataatttattgatttaataaatatttagtgaatgcctactaagttccagttcctatagcatagagtttatattaaattgaggggagcagacattatgcagatacatgtggagttaaaaaggtagaactctatagtatacagtaaattaaatcagggcaaggagatagagggtggcaagtgctttttatacaagatgggacaggtgaagtgccttaagaagtgcctaagtttttcagttctgtacaagtccagagagcaaacttatttgtggctgtcgagaattgagggtctcttcttggaaagttggaacttaaagctggcccgtgaatgaacaaggtaatgaacaagccacgtctgtacatgacaaacaaaagatggaaacaatttctattcaggattgactagaaagggtttaggcatacggagtcttgaagaagaaaagaggaatttgatttcgacattttatttagtttcaatatactgaagtatttgggccaaagaataatggaatgtgtgggatttttgtaacctctgtgtttgcatggagtggatgagagagagaggccagcttacaggcttttgtgataatcataaagtgaggagactatataaattttttatctgcacaggcatagattgtttcgtgttttatttttaagggctgttgtgtgaacatggggtggggtagaggcatcatgtcatctcctgacttgtgaaagtgatttgctgactggaaagtttgaggaccactgttctagtcccagtatgctggctgtggtttatgtgattacctacatgcttcaacaggattcaatcaggaaatactttttaaaattatatttattgatagagcaccaagaagaacttatgagatagtgaacattgttgggctggaataggcagccagaaatgtttctgcagatggattattataagaaatggccaacatttaattcatatcctactatataggaaacaaatacatgttaatgttataggataggtatatataacataagctagtgatatcaaacagatgaatttaaagtttgtatttgttagtgaatgctgcctgtgcattaaggtaccaatcagacatgacacatgcatgttgtgggtgatggtgcagggataacacattctttctttctttttttgagacggagtcttgctctgtcacccaggctggagggcagtggcatgatctcggctcactacaacctccgcctcccaggttcaagcgattctcctgcctcagcctcttgagtagctgggattacaggtgcatgccaccatgcccagctaatttttgtatttttagtagagatgggatttcaccatgttggccaggctgatgtggaactccctatctcaggtgatctgcccaccttcgcctcccagtgttctgggattacaggtgtgagccacgcgctcggccaacactttctttcttaaaggcagatcccatcgctacatgggaatagctacgtaaatgtgtttgctaaaagcagaaccaacttctgtgattagtatgcattttctgctagttaccatattgagaagaggtgtttcataacatttttctgaactgttcattatgaactacaagattcacactcttattaacctgatttctacctccattagatgatacagaggaagaaaaataaatcctattttagtcatcatttccttagaacttgtaattgaaatactatattttctgcttcagtatataagctcttcttgaaaggtgttccattgtatagaaagtagatttttatcttttaaatcataagagtatgttgaatattgtaacaccagaatctcagcatcaacccagtttttgtaggaattctgacttaaacaatttaaggtcttacaagtgaggttcacacttactatacttattgttacaaataatgtttgatttcttaaaaatatcttggttaacaggattttcttagggtccctctatatttttcgtcatgttaggtgactataaataatatgagcatgagtatcctgaaatgtaagcggattctattattagcaatgtgttaagtatcttagcttgcatcatttaaaaacgtttcagttatttttgcaatttatattttatttttcatttcacatctattgtaccattaaagttcttcatgatgtttgtttataaagtaagtcctacatatgctgcgttttctctcttatattaactgataaagctgatattaccaaagcataactagtacttgattctcttgagattagcagtgttgttggcctggctggcagttatctgcaagttgctagaacacattttatagcagcttctattagtcaacagaaacgcttagaaaactgcctcctgtatgcttcgtattaggccattgagctggcaaaagagggagaacttaaaattgtaatttaacttctttaaaatatttgtttagggagatagtcatataatgaattttcataaataatgttaaaatttaggaaatcttcagtaaactgtattttctgagtccataagaatatgtagtttaagttctaacattttaagatttggtttcatattttgttcattggtaggattggagattggattatattaaaaaattaaactgtttttagatcattctcaattctatgtgtctgtttttataacaattagaattggcctttaaaattcttacccactgatatcataatacaatttttgtaaataatatgtatttttgcattttccatcattatttatcaccaggcttgaagtagtattaagaaaaaaacccatcttgtatttctatcttgacctttccctcagccctctcacaaaacctgaaaacacgggtctttattttttatgctcaaatttataataaacaaaggttgataaggaaaaacaagacctcacaccccaaagaaaaaggacaggagggtcgtggaattgcttagcgtgttgcatgggaaattctgtgtaaggaagtaaagagctttttgctgaaaagccacctagagcccttgggcaggggcattttattttcccatagataccatgttaccaattacataaagaagagtatagacttcttgttagttgataaatagagattgcaatcatttattaggttattttatggtatttgttaacgatatttaccttcctaaattgattcagcataatccttagaacagctttccttcatttctggaagacatatagataatgtggtacttatatgaaagcttacatgtcactgaaaaactgtgatttttgccttagctcaacggagcagcaagattatattaacatagactttgggccatttgagttcccatagggtatagagtgtagctgatatgacatgacttgcctccaacagttgttttaacaagatatccttcatatacagtatattgagctgaaaggcataactgagtaatgttagcaagaaacactgttggcaaaatgcttgactttcatctttatctgattaatccaaagcaatgtgttagtacaaaaaagtattttcagctgaatatatatgacagaatatttatttctttttaatgtctataactttacaagaactatttttggtgtgtgatatttttattctacaaaaagtttttctatatccattacaaagggcaagtagaaaaatatccaggactttgtgaggcttgatgaggcttattcatttgtataaagatttgttgagcacctaccaggtaccaggcaacatcctaggcatcgtggggatacaacagtgggtgaaacgggcaaaggtatgggcccttgtggtgtttactgtcctgtggaggtagcaggcactaaacaaataggtcaattatagaatacctaaaaaggtgataagtactacagagataacaataaacaggaaagtgggctaggaagacctagaggtggggtcaggtttgcaattcaaaatggggtggtcagaagaggtcttgctgaaagggtgacaatgagcatagttgtgaaggagatgtgggagtgagctatgtggataccttgatttccttttggaaattattagttcctgtcagctgactgtattgccagtgcttgctctctccaggaatgctctttcctgtttcctgtgtttaaattttctctgtaatgccttatattctattttatattctactttgttggaggaggaatgtatttgacagagcagtgagctcattggatgaaaggttctgtgaatttcttttaacaaagcataaaatcaagcttccataaatactccaaattgcaccgtatcaagaatttgttttttgtaaatgtttgaaagtgtaaaagaaagcttttgcactctaaaaatggtatttttactaatttactaattaacacttttcttctgcttagcactttcaagacttgatttaattacagtttctagtaccttaaatagtgttttaaagtgagtcagtgttgctttgctcaaaacattgcagtaagggtttttttttttttttgccccttttggcttcaatttatatgaaatagattttttattttccctgccagaattctcattgaaaatacatatatgaccgggtgcagtggctcacgcctgtaatcctcgcattttgggaagctgattgcctgagctcaggagttcgagaccagcctgggcaacatggtgaaaccccgtctctactaaaaatacgaaaaattagttgggcgtggtggcgcatgcctatagtcccagctactccagaggctgaggcaggagaatcgcctgaacccgggaagtggaggctgcagtaagctgagatcgcgccactgcactccagcctgggcaacagagcaagactgtttccaaaaaaaataaataaataaacaaacataaaaataaaaaaaagaaaaagaaaatacatatagttctattacttgcctgacggaactgcggacaatcagggatatattagatgggtatttgtttcacagacccaatgatagagttaattgaacacattttccttcgtaatacccaagtatttctggtttgattctgggcttagaaataaaatggaagaagctccaattctcttctttattctgggtttggagaatgcatttaaattggcttccaaaatattgagaagattcctcccctggagaggtgcctacatcaccatctatggtaatgtcagagcaatgaatcaattagatttgtttggtaatgtatacattaatgtcttacaaaaacaaaaccaaaaaaaaaaaaacaaacaaaaaaacccacatgtgaaccacagatttccaaaaacagtagaaagtcaggtatcagttaagaaagagattgaagagttagatttttaagtagagcatttttctcttagaatgaaataaccttagagtaacacaattgatgtaatattaagtctattcatatttaagattgggtagaagaaattcttggagagcaaactattctcagtattgcttccttcctggcagaattcacatagaaataggggtagagagtttcttgctgacacaggtgtgcagtttcacatttcttatgttgcttaaaccagtaaagttttagaaaatgaaattattttagaataagaatttattttacagagttaaatagatttaatatcagaaaataattgagaatcactaatattttcagtgaattatatgacatatctggaattacattccccaaagtaaatgcataactgctgttttgctggtaatagttgacttccctgagtctcaaaccccaatttgcctgtgctaataattgtgcatgcatgttcagacaaatcatactcagagatgcttcagatggctttcttctgtgtccattttggggttattttcagtaccatttttcattgaagggagaaatagctgtttatacagaagatgccttccttttattaccatctttcctcctccatgtagaactctttctctctctctgtcttccatacagatacctcatgtatacatatattttcaaggttcacttgatttgtactttttctttttcctttttttttttgagacagagtcttgctctgtcgcccaggctggagtgcagtggcatgatctcggctcactgcaacctccgcctcccgagttcaagcgattctcctgcctcagcctcccgagtagctgggatcacaggtgcacgccagcacgcccagctaattttgtatttttagtagagatggggtttcaccatgttggccaggctggtcttgaactcctaacctccagtaattcacccgcctcggcctcccaaagtgctgggattataggcatgagccaggccttttttttttttttttttttttttgacaatttcgctctgtcatgcaggctggagtgcagtggtgccatctcggctaactgcatcctctgcttcccaggttcaagtgattctcctgcctcaggctcctgagtagctgggattacaggtgtgtaccaccacgcctagctaatttttgtatttttattagaaacggggtttcaccatgttggccaggctggtctcaaattcctgacctccagtgatctgcccccctcagcctccccaaggtgctgggattacaggcatgagctatcgcgcccagttgaattgtactttttctttcaaatgttcaggcactgaatttttcctgtgtgcatagtactgttgggcaataaaggtttataaaaatttaaaaatatgtttctcacccataagaaagttacatatagtgttgctgaggagacaaggtacaatatcagcacttttgaatggacatatagtccaatctgatttttattttattttttaatttttttgggacggagtctcactcttatcacccaggctggagtgcagtggagtgatctcagctcactgcaatctctgcctccggggttcacaccattctcctgcctcagcctcccgagtagctgggactacaggcgcccgccaccacgcctggctaatttttgtatttttagtagagacggggtttcatcgtgttagccaggatggtctcaatctcctgacctcgtgatccgcctacctcggcctcccaaagtgctgggattacaggcgtgagccaccgcgcccggccccagtctgatttttttaggggaataaagtaagacccaaatatgtaaaatagttgataaataaatagtagtagacaggcaagtaagtgtgtagttaagtgccacagtgaccattaccactaataagaatagccaagttcagagaagcatgaaatcagttaaagttggagaaagtctctagaagaaaatgaaacctgagttcacctcagatgttttggggcattgaaataaaacatttgagatgagagagctgcatgaacagaaagtttgaggcaaaacctgggcatcgcctggttacattctaacatgatcaggagatgccagagagcattgttgcgtgaagtgtgagtgacatcacaggaaagcgtgtaagagctgaaagaagagaccacaagtagggagcccatctagaggttttgcagtctttcagcacttctgtttacattttactctgatttttagttaaaagctgcttaacaaagagaatgttgttctttctttttcacttgcttttgctgtctaaatactatttcctgaagtgtttcccagaggccgtttgttaataagtgttatttgggaagtaggttaggtgatttggtaaacacttggttaaataaaactagccaagttctttaccagcaatgtacatcactaataagctgatgtacaatgtgaaatgatgagggaagccttgctgtatagtatttccccataataacgtttgtccatagagctctattatcagatgatattgggcgtgttcagggtggtatggccgtagactagagctctattaccttaaatcattgcaccaaggactagtgttccttggagcatactctgcaaatggtagatgagaaatcacttctctcatttcagaaccttgacaataaaaatctagagcagtctgtgtagacataagaattgaaatatctatctggtttaagagagaggaaaagagaccaacttttttttttttccccagcttattctcaagtactaaagtgtgtgtgagcaatcagctgccaaacaggaagagctgttccacttctaattttagcttgccaccttgcattgctgtaggagtggttcccacatgctgcaaagaggttattttgtgtaaatagagacttcttctatgtcgtcaagtgggaaagaatcatcattaggcctccccaccatttgcacagtttctgcatgttgaagatgatctgtccaaacatttagacctggtttaattcttttgcattcataatttaaactggatcaaggattcctgctgtccaggatcagtgaactgatgcaacttatctctcctctttattccccagaactggacagcatttgctgtctagtctcagccaaaaggaaccacttcttcacagctctgggtgtccatgaatcaatttgtattgaaccactttgtatgacaatccttggggcacacttgtatattttgggttattttggtgatagcaaagtggaatgccctggacggcaaactaacattgttatcttaggctgatttataggacttttctcctggacagccaaacgtgcaatgatttctctttaaagatttattaaaagatcaattgtcctcgatgattggtcatgccagtgagaaataagcactattaaagcatccgtggaatggagaattgtgttataaacacagttggttctcagtgaatagtgttggttgactggcccaaagagaatcaaggtgaacccaatgagaattggaacatatgcctgactgaaaattttaaaatgcttggactcccgtttgtgctcctagaaacaatcacatttataagacaatattggtttgtttgccatagaaacacataaggcctagttgtaagaaagggagacctagcagccgcaaggcacacacggctggagttaccttaaaaaaaggtaaagttaaggtgactttggaaggccatttagactttgtttttgaaaattcaggttttctgaagacgttttgcaaatttgatttaaaagaattttgctgactctgtccagtttaaatgtaaaccctttttgttactcttgtttcattgaagtatattctgccactaccattgtgttttaccgtgtcgatttgacactcccttcttgtgaattttatgttgtgacgtttagaagactggaataagttgtatttatcaaaattgcattatatggaatttagcactatacctcaaacaagaagttgcttaagaaatgaattcttaggataggaagtataaagcagtggttataaacaccaattttagggctggcccaagtttagaatctcagctctgccacttggggccttaaagcccaacttattttctcattggtaaaatccaagtaataaagtctgccttatagagtggtgcgaggttttaatgcccggttgtatttaaacatttagcagaatatatgacatttaatactctttaaattatagctgttattattcaaaagtgactttgggccaggcacaatgtctcacatctttaatcacagcaccttgggaggctgagataggcagatcatcacttgagttcagaagttcaagaccagcctggccaacatggcaaaaccttgtctctacaaaaaaacacaaaacattagccaggtgtgggggcgtgtgcctgtagtcccaactacttgggaggctaaggtaggagaatcatttcaacctgggagacagaggttgcagtgagccgtgatcatgccattacactccagcctgggtaatggcgagactgtctcaaaaaaaaaaaaaaaaaaaaaaaaaaaaaaaaaaaagaagggactttgcctttgcctccactccatgatagcagagaaagagacaaacagcttatgcaatcatatgagggtagagataataaaatgtggccattatagttatgtgcctaaatcactgaagatccaactggaccttattatgagtagtagctatattggcaactaagaaagtctcactttagaaaaggagagggttgtattcctgaactgtgggataatgagagtctccagttcctaatcatgtatacctcctcactaggcttaacctgccataagtttacttccattttaaaatgttgcttcagaaggatggggtgatagaattatgttacttctaggggaaacagtgcaggaagaggaggtgcaggtggcagttcaaacaaattctatgctctattttattttaaaatcttaggactttttaatctattagtcattctgtcattgggagaaaattgccatgtctagaatttaggagcctctcaaatatttgaagggtatccagttttactctagagctagtgcatttctgataacagaatccccgtgggatccccagtgtgagaaggtaccactgggacccccagaggctctgggtaaggatgttaatgactatctatattacctctctatccacagtaattgagcaagaaatccacacttctcctttttcctagaagaccactgaaagttctaagaactggagttaatactatcatttccttgatcatctcatcctttaagtaatgcaggaatgaaagcctcttctcagggtaatcccaaatgagaaatttggaaatttgatgtttccgtcaccatggcactgtattttctcagacattagaaactttagtaaaagtatatcaaaaagagtggggtctttggtgtaatcacatcacccaaaataaaaatagtctatttccaaacttattagactataacacctgtattgaattggctttaactagttttaatgctgttggcaccactataagtttgaattaaggctagtccctaatcacttttagttacacaaattcatgaagtacatagctatgagataatctcagcattttgtccactatatatgcttgggtctgcattaaatacagaatgtgggactagtcataaaaatttcctggttccatgggaactttcctgaggtcagtgcaaaggaaggcttgcatatgaatgagggcaccattttttcctaacaggtaatcaaacgtagtataagaagacctcagttcaggaatgggttatgttctaaaagttaggaagttagtggtttggcatcctaaaataattttcccacaaaacagtgttataggtggaaggtggctaacccttcctcctataaaaataatgaaaatttccttgacactctatcttgagtcccatggaatccctctgggcaagggaatcctggggacctgtgtgatccttggaatatacaagagaggaggtcggcaggaaagaggggagacccttgaggttattttgagtgtagagaaggaatatgtggtcttgtggccgtgaaattgatgatgaaaatgaaaaggagtatcaggtacctctggaaaccgtctgccctcatatgggatagcatctagtaaacagatggcactggagagcacagtgtttattccttgggaagatccacatcagtatagtgtgagtaaagcaaaacatttattttaatggggatgttttggcgtaagatatgaaaagtatatggcactgaccagggtgtttcatagtagccaaactgaagtttgacctcatctggagaagttttataatttttctaacattgatacctctacaactttcttagcattataaaaagttcaaggcacatgaatatggacattattctgggcttccttctcccttacctgcttctttggtaccatgttgcgtgagatttgtctattccaagataattctgatattccagttctttccagtgatgaaggaagttgagaaataatttaaaagagaaacaaatcctgtatagacaggagtgctgtcagtcattaatattattatctggcttatttgtagtccacttcacctgtttggtttaaaatgaaatatctggaatgttctgtcctggaagagggtttgaggaggagaaaatggcgtaattatttattcacaatcagctaattgtgctacaaatcccttttgctcccaactgagtatgataatctccttcagaagggaaggattcattggtcattcttagaaaactcactgaaatgcttgggaaatttacatgggaaaaatctattctctcttctcgtagaatgattcattcacagtggcccccagtgggctagtcgtgtgattaaaccaaaggtttctggatctttaatgcaagctgagcccccccaacacactttttttttctagcagatttgtgccatagaaactgaactattaaagtactaagcatgccgtttttcttgtgaaaagacattttatgttgatattgtttcattttttaaatatagtaagatacaaccaacactaatatgtgaaaagacattttgaactgaattcattatcttttattttagatttatgttgaagtattattacgattgaaagtattatagttactttcatatgagttaaaactcagctgtaacaattcattgactaaatattatgatggtagtcaactttcagttggaagtgttaattattcacctcatagtgcactcataaaaaagatttaccaacagtctcctaggagtagaaggcatattgtctcttggcatattttacaaacatgctttccacacactcccagtacaaggttattatactttctcttctgtgacactcagaaaggctgtagatactcacacaggattggacatgtcattatatgttaaaaatgatgtgtatttttcttccacttaatgggcattggaagctttatttagttgactgcgtaagttaaagaacatcttgataaagcaattacaaaaaatatttttgcttacgtggataataaaatgcatatatgctatgttttgatttaatggttgttttccatatattcttgttttggtttaatgtttggtatattcttgttttgatttaagggttattttccatatattcttctaataattaaaaacttttaaaagtttatttatataagattatttgcttaatgatattagtattgcagagggaccccttgttttttaaaaaagggtcacagtatacttaggatgtttgttactgagttagggtttcactgagttataatttcagttgtacagaaagaagcggcagaatttaacaggacagtaatgtaagacaaataatgaaagcaaataaatgttgtcaagcacaatcacgtaaaatctgaaatgtggatttatgagttcttttaccattttgtgccagataccctttattctgacctaaaatgaattctaatatttgaccttgtaagatttcttgtcattttcttccaacccttttaaatgaaatataactttctcatctcttctcctatcctaccacataacctctcctattagtatggcctagtgagtagagacattcatctggggttattgtaagacagaagttggagaggaggtttgtcacttcttttaatttgctaattctccatgcattgcacaagattctggcattacctgaaaatagagcccaagagatggggccagggcctcaattttagttgtctctcagaagtcagactgaagttagatctaggtccatgttagggacaaagccaagaattttccatttaaatttcaacaagtgtggcaaaaacattaaatgtggcagcagaacatagatattgtataattgtataatatgttatacaatataatattgtataatatagtatacaatataatattgtataataatatagtatacaatataatattgtataatatatagtatacaatataatattgtataataatatagtattattattattgtataatatatattatacaatattgtacaatattgtacaatattattatgtataattctcttccattaaaacatttatttaaaattaaagacttcaagcctaacacttgtcagaatgaaattaagccaaacttaacttactgtgttaatttgatacaggatatttgttttctgatgatgtgattattaccaagtagggaacaaaaaaataaggacttctgtgcaaatgataccattaatgctagaaagtaataagtatctcacctcactgcactacaactataaaaaatagattcatgtttatcaagtgattaactggaaattcatttgtattggctaaatgttttaaagtaggtctcagaaatgacaaatggtttttacataaggcagacttacaaaaaagtagtattatattgttaatgccagtcatggttgggggagaaatgtaattttatttatacaagtactaagtcattgtgcacacataaatatactcttcaagcaaagggcatctcattgaatagagagtgaaaattctggtattgtgtttaaagtgtgtcattttaatgaaaacttagtatatcaaatagatcagttttcttggagtaagagtatattttaatacatcctcagtgtactcacaaaccaaaataagaaatgtgtttatattcataattgttttcatacttcagtaagtacctcacccatctggagactactgtgtttaacaacagcaaacatctccacaagtgaggggggagtctagattgtaactaccaatgaataatgatttgaaccagagaagacattaccatttaacaattgcccaccacggtgcggttccaagatcgcggaataggaagagctccagtctacagttcctagtgtgagcgacacagaagatgggggatttctgcatttccaactgaggtactgggttcatctcactggggcttgtcagacagtgggtgcaggacagtgggtgcagcccactcagcgtgagctgaagcagggagaggcatcacctcacccaggaagtgcaaggggtcagggaattccctttcctagccaagggaagctgtgacagatggcaactggaaaatcgggtcactcccaccataatactgcgcttttccaatggtcttagcaaacagcacaccaggagattatatcccgtgcctggctcggagggtcccacgcccacagagcctcgcttattgctggcacagcagtctgagatcgaactgcaaggcaggagtgaggctggggttaggggtgcccgccattgctgaggcttgagtaggtaaacaaagcggccaggaaactcgaactgggtggagcccaccgcagctcaaggaggcctgcctccacctctgagggcagggcatagccaaacaaaaggcagcagaaacctctgcagacttaaatgtccctgtgtgacagctttgaagagagtagtggttctcctagcaccgagttttagatctgagaatagacagactgcctcctcaagtgggtctctgacccccgagtagcctaactgggaggaaccccccagtaggggcacactgacacctcacatggccggttacccctctgagacgaagcttccagaggaaccatcaggcagcaacatttgctgttcagcaatatttgctgttctgcagcctctgctgctgatacccaggcagacagggtctggagtggaattccagcaaactccaacagacttgcagctgagggtcccaactgttaaaaggaaaactaacaaacagaaaggacatccacaccaaaaccccatctgtaagtcaccatcatcaagatgaggaagaaacagagcagaaaagctgaaaattctaaaaatcagagtgcctctccccctccaaaggaacgcagctgctcgccagcaatggaacaaacctggacggagaatatctttgacgagttgagagaagaaggcttcagacaatcaaacttctccaagctaaaggaggaaattagaacccatcgcaaagaagctaaaagctttgagaaaagattagatgaatggctaactagtataaccagtgtggagaagtccttaagtgacctgatggagctgaacaccatggcacaagaactatgtgatgaatgcacaagcctcagtagctgattcaatcaactggaagaaaggatatcagtgattgaagatcaaatgaatgaaatgaagtgagaagagaagtttagagaaaaaagagtaaaaagaaatgaacaaagcctccaagaaatatgggactatgtgaaaaggccaaatctacatctgattggtgtacctgaaactgacggggagagtggaaccaagttggaaaacactctgcaggatattatccaggagaacttccccaacctagcaggcaggccaacattcaaattgaggaaatacagagaacaccacaaagatactcctcgagaagagcaactccaagacacataattgtcagattcaccaaagttgaaatgagggaaaaaatgttaagggcagccagagagaaaggtcgggttacccacaaagggaagcccatcagactaacagcagatctctcggcagaaactctacaagccagaagagagtggaggccaatattcaacattcttaaagaaaagaattttcaacctaaaatttcatatccagccaaactaagcttcataagtgaaggagaaataaaatcctttacagacaggcaaatgctgagagattttgtcaccaccaggtctgccctacaagagctcctaaaggaagcactaaacatggaaaggaacaaccactactaaccactgcaaaaacatgtcaaaatgtaaagaccatcgatgctaggaagaaactgcatcaactaatggacaaaataaccagctaacatcacaatgacaggatcaggttcacacataacaatattaaccttaaatgtaaatggactaaatgctccagttaaaagacacagtctggcaaattggattaaaagtcaaggcccatcagtgtgctgtattcaggaaacccatctcatgtgcagagtcacacataggctcaaaataaaggatggaggaagatctaccaagcaaatggaaaacaaaagaaggcaggggttgcaatcctagtctctgataaaacagactttaaaccaacaaagatcaaaagagacaaagaaggccattacataatggtaaagggatcaattcaatgagaagagctaactatcctaaatacatatgcacccagtacaggagaagccagattcataaatcaagtccttagagacctacaaagagacttagactcccacacaataataatgggagacttcaacaccccactgtcaacattagacagatcaacgagacagaaagttaacaaggatatccaggaattcaactcagctctgcaccaagcagacctaatagacatctacagaactctccactccaaatcaacagaatatacattcttctcagcaccacatcacacttattccaaaattgaccacatatttggaagtaaagcactccttagcaaatgtaaaagaacagaaattataacaaactctctcagaccactgtgccatcaaactagaactcaggattaagaaactcactcaaaaccgctcaactacatggaaactgaacaacctgctcctgaatgactactgggtacataacgaaatgaaggcagaaataaagatgttctttgaaaccaatgagaacaaacataccagaatctctgggacacatttaaagctgtgtgtcgacggaaatttatagcactaaatgcccacaagagaaagcaggaaagatctaaaattgacacactaacatcacaattaaaagaacttgagaagcaaaagcaaacacattcaaaagctagcagaaggcaagaaataactaagatcagaacagaactgaaggagatagagacacaaaaaactattcaaaaaatcaatgaatccaggagctggttttttgaaaagatcaacaaaattgatagactgccagcaaggctaagaaagaagaaaacagagaagaatcaaatagatgcaataaaaaatgataaaggggatatcaccaccgatcccacagaaatacaaactaccatgagagaatactataaacacctctacacaaataaactagaaaacttagaagaaatggataaattccttgacacatacaccctcccaagactaaaccaggaagaagttgaatccctgaagaaaccaataacaggctctaaaattgaggcaataattagtagcctaccaaccaaaaaatgtccaggaccagacagattcacagccgaattctaccagaggtataaggaggagctggtaccattccttctgaagctattccaatcaatagaaaaagagggaatgaggccagcatcatcctgataccaaagcctggtggagacacaacaaaaaaagagaattttagaccaatatccctgatgaacgtcgatgcaaaaatcctcagtaaaatactggcaaaccgaatccagcagcacatcaaaaagcttatccaccgtgatcaagtgggcttcatccgtgggattcaaggctggttcaacatacgcaaatcaataaatgtaatccagcatataaacagaaccaatgacaaaaaccacatgattatctcaatagatgcagaaaaggcctttgacaaaattcagcagcccttcatgctaaaaactcttaataaattaggtattgatgggatgtatctcaaaataataagagctatttataacaaacccacagcaatatcatactgaatgggcaacaactggaagcattccctttgaaagctggcacaagacagggatgccctctctcaccactcctattcaacatagtgttggaagttctggccagggcaatcaggcaggagaaagaaataaagggtattcaattaggaaaagaggaagtcaaattgtccctgtttgcagatgacatgactgtatatttggaaaaccccatcgtctcagcccaaaatctccttaagctgttaagcaacttcagcagtctcaggatacaaaatcaatgtgcaaaaatcacgagcattcttatacactaataacagacaaacagagaggcaaatcatgagtgactcccattcacaattgctttgagaagaataaaatacctaggaatccaacttacaagggatgtggaggacctcttcaaggagaactacaaaccactgctcagtgaaataaaagaggacacaaacaaatggaagaacattccatggtcgtggataggaagaatcaatattgtgaaaatggccatactgtccaaggtaatttatagattcaatgccatccccatcaagctaccaataactttcttcacagaattggaaaaaactactttaaagttcatatggaacctaaaaagagcccgcattgccaagtcaatcctaagccaaaaggacaaagctggaggcatcacactacctgacttcaaactatgctacaaggctgcagtaaccaaaacagcatggtactggtaccaaaacagagatctagaccaatggaacagaacagagccctcagaaataacaacacacatctacaaccatctgatctttgacaaacctgacaaaaacaacaaatggggaaaagattccctatttaataaatggtgctgggaaaactgactagtcatatatgtaaagctgaaactggatcccttccttacaccttatacaaaaattaattcaagatggatcaaagacttaaatgttagacctaaaaccgtagaaaccctagaagaaaacctaggtaataccattcaggacataggcatgggcaaggacttcatgtctaaaacaccaaaagcaatggcagcaaaagccaaaattgacaaatgggatctaattaaactaaagagcttctgcacagcaaaagaaactatcattagcgtgaacaggcaacctacagaatgggagaaaatttttgcaatctactcatctgacaaagggctaatatccagaatctacaaagaactcaaacaaatttacaagaaaaaaacaaacaaccctatcaaaaagtgggcaaaggttatgaacagtcacttctcaaaagaagacatttatgcagccaacagacacatgaaaaatgctcatcatcactggccatcagagaaatgcaaatcaaaaccacaatgagataccatctcacaccagttagaatggtgatcattaaaaagtcagggaacaacaggtgctggagacgatgtggagaaacgggaacacttttacattgttggtgggaatgtaaactagttcaaccattgtggaagacagtgcggcgattcctcagggatctagaactagaaataccatttgacccagccatgccattactgggtatatacccaaaggattataaatcatgctgctatgaagacacatgcacacgtatgtttattggggcactattcacaatagcaaagacttggaatcgacccaaatgtccatcagtgatagactggattaagaaaatgtagcacatatacaccatggaatactatgcagctacaaaaaaggatgagtttttgtcctttgtagggacaaggatgaagctagaaaccatcattctgagcaaagtatcacaaggagaacaaaccaaataccgtatgttctcactcacaggtgggaaatgaacaatgggaacacttggacatgggaaggggaacatcacacaccggggcctgttgtggggtgggggaagggggagggatagcattaggagatatacctaatgtaaatgacagtttaatgggtgcagcacaccaacatggcacatgtatatatatgtaacacacctgcacattgtgtacatgtaccctagaacttaaagtataaaaaaaaaaaattgcccaccaccttacaaagctagtcatcctcctttagaaacacacttttggggggaaaaccatctatttattttcatctattcagataatttacaactaaggttaaatattctctgttttcatataacccactatatggacaataaataatgattagaaaatgggaatttaaagatgcatttgggcttttagttattcaatttattatctttaaaaatatcttctgttttatttatggtaaaccaatattttaatatcgaataattttaatttaaaatctttgatcttccctctgcatttgtggctgcatgttttatcttactcaactgtatgataaaggatttttttttttttttgagatggagtctcactctgttgcccaggccagagtgcagtggtgtgatctcagctcactgcaacctccacctcttgggttcaaggtattctcctgcctcagcctctcgagtagctgggattataggtgcctgccatcatgcccagctaatttttgtatttttcgtagagatgaggcttcacctttttggccaggctgatctcaaacctctgacctgaagtgctccacctgccttggcctcccaaattgctgggattacagatgtgagccaccgcgccaggctgatgaagtaataacagacataattgttagcttctaatgaaattaggaatgtacaaatttattgcaactattattataattttgaacacctccaaaactgatttttgctttaaatcttggtgcttccatgttaccacatgtgtatcttgttttcactatgtaacaggtgtttttctgaaagatttaatggatatggttctgcaaacttagaattattcagattttaaaaatagtgactgcagaattgtagaattaccatttttatttcaagttggcaaaaagcagttaacgtatacgttgggacattgaacaagtgacagcagagttccagatgaccatcaaagtgacatttaaaaatattgctagtctgactttacagtcctcgagttttaaatcattataaaattggaggctgtgcggtgtgttctttaccttttgtggttgaaaggtaggagtgcaatgagtgtgtgtggtctgagtttttgtggacgtgatctacatttaatctggggaaattaattccctaagctgctggcaggcagcatgtacttgttaattattcaggtggatgacaaatgcagagcagaggttctcgcaaagacaaagtttgtatgatgcatgtttagtaactgataggcctgacattctgtggtgtcttattcagtgctaatcctaataagctgcctggtgcgatgaacgccttttctcctgtcctctgcagagaaaacagagatctgaaagaacttcattatggcaataaatcctgtacttcatggtattcttggtgaaaaggtattttgtccagatgaaaaacaacagaaagtctggatgttagtatggtatcaagtcctaaagcaaataaagccttacacaaaggcgtgggcattctctgcttttatttttttattttttttttttttttgagagggagtctcgctctgtcgcccaggctggagtgcagtggcgcgatctggactcactgcaagctccgcctcccgggttcacgccattctcctgcctcagcctctggagtagctgggactacaggcgcccaccaccatgcccggctaattttttgtatttttttttagtagagacggggtttcaccgtgtttgccaggatggtctcgatctcctgacctcgtgattcgcccgattcgcccgccttggcctcccaaagtgctgggattaccagcgtgagccaccgcgcctggccggtcattctctgttttttgtgtgaaggtgatcccagcttaattttgttaatctagtgtgcatggatacatggacaacaggggtttgttctgagtctggcagtagggaaactttcaccctcccctttctaatctaatatcgttaggtttaggaagatttcatacatttctatgccaatatgttttatttgtagggaaagatttcccctggaaatactggtgttatctttttaaaaacttctcaaccagttcttctctcaaaatctgccccctttctgccattgctaattgaactgtgtaaaaagttgaatagctcagctagaaagtactagaaagtacttcatggccaattcttagttcttaggtgtatttcatgcttccactttacttcccttttttgttaaatgttcaaagacttgattgatgtaatatgcaaatcatagtttatctaagccaatttagtttcaaaaacgaagctattttttggacactaaagagaggcaatgtgtttagagagaattgggaacaggtttagtattggactgttaactcagggtttgtcagtcaaatctgtgaccttgtacaagtcacttagtctctctgtgcctcaatttccttgtatggggagtaataaaattgaactaaataggcaatgtgtgtttctatgattaaattattttgcttctagttatcatgagcttatatccgtagtctggcaatgttaaaataagcagtttctgagatgaagaattctttccgttcctgcaagtatgtatggctgcagaatgttccagtaaccttctatgacggtcattcatgactatggaaatctcctcagcggcttctctacatttggctcctctacttgttatcttaatgtttgattcactacttggtaatattttaaatgtcactttagtcatctgaaactctgctgtcaattgtttaatgtcccactacttatgttaactacttttctgacagtttgaaataaaaatgtaatgcctgcctatagccagcaccttaatcaaggaataaaacagcaccagtaccatggaagacattcttgttgccactctttgtgcaattttttccccccattctaagagtaattctggaccaggtgtagtggttcatgcctgtaatcccagcactttgagaggccaatgcaggaggatcgcctgagcccaggaatttgagaccagcctgtgcaacgtggtaagacatcatctctgcaaaaaaattggtaaaaaaaaaagtgtaattctgtctctgaacacagatagattagttttatctactcttgaacttcctataatagaatcatatcatatgtaatcatttatgtttgacttttgttttgctcgacattgtaagatttagctatgtgtatatcattgttgtttgttcagtctcatcactgcatagtgtttcattttgagaatataccacagctaatctgttttattattgatgaacatttgggcattcccaatagtgtagatatgaacattgttgtacatgtctctttggtaacatgtactcatttctgctggttatatatgtagatgtgtagtttgctcagtcctaggatatgcatatgattatcttttgtagataatgccaattttccaaagtggttgtaccaatcagcaatatatgagaattccagtaactctttatctttgccaagatctgttttctgtcgttcatttttagccattctggtggatgtgtattgcaatatgcttttaatttgtaatatcctaatgaccagtgaggttgaaaacattttcaaatgtttatgagccacttagtgttagttttgtgaagcaccttttcgtgtgtttttttactaatttttttctactgagttattatctgctttcttgacttacagttctgcaaatattttagatacagatctttttatacttttgagatacaaatataatctccctttcctcatatttttccatttcactcatttaattgtatctgtagaggaaaaaaaactcttaactttaatatagtgcaatttatatatattttcctatttagaaatttgtgtcctatttaagaagttattgtctactgtagcatcatgaagatgtttacacatattttcttttagaaccctttagatatgcattccatctagaattaattttgtgtatggcatgaggttgagggctctatggatatctaaataatccagctccagttgctgagttggcattatctttttcccacagcactgtagttttgccctatcataacttaggttatcatatgtgtgcctccaatacaaattttaattttagtattttatagaatttttttcagatttagtataggattgtagagagtcaaattataaatggtaggcatttaactgattcaaagatgatgatgacaacaatgatgatgacaatggtgaataccatatattgattacctacttattgctagactagtactgtcctagacactttgcctagtgatgtatttcaatactcaaaatgacagttttaggaaactgaggcccaaagaagtcacacagctggtaaagtgggaaaacatggattctagcaaagttctaactaatttcaagactctatttgtaattgctgttttaagctcatctaagaatgctaccaaagttccggtctctacagtctgaacaaaagcaattcttaaaaagaaaaaggcaggaaagtataactagtgtatcaaactagacttttcatatttcacataacttagtatactcaagttgactctcaaatgagactaatttagaaataaatcagtgaagccatataaatttcaatgatctcccattttccttaagagtggtgggatatgaaaactgctattaactgaagttttgattcattctttaaattgcctgagaccaagaccagttgtgcactttgagtgcttcacaaaggtgctcaactgagggggcttttggaaatggaaacttagtctatgttccagtagccaatccttgtatccgtggagccgagtctatccagagaaagaaccttgcggcctttttccaagtcacacaaagccctggcaggcaaggtcaggtctaactcagctcagatcctcaaggtgtacatagaacaatagcagtttcccgaggaaagctctggacaatccactcatttctgagcaggcagcatgggcaccactactacttggctctcctgtgactgctcagctttagcaaaggtgccagtataaagattataatcagtgttttagtaccgtcatacatttgatactaaatttgaggacatagattaaaaaatctcatgaaagccatggacatcttaatactatggtaccatctttgcgtattcatacatacatacaaaattctgcatgtatttcaggaggcccaaggactagaggatccattccatggactctatgaatctcaggttcagaagccttgctttaaaattctacattaaatgtaatgaaggaaaaaaaaatgtagtttgaatgaaagaaatggcactaggaaatggtgatagagtttgaacatgctttgtataaggtaaactcttctctaaagggaattactcgatattaaataactaaacattataattagctcaagaaatatacttgaagaggacaaagtatagtacaaagatgtataaagttatataagttgttcagaaaactaatccaagggatagttgggagtctattgtagggaaaaaacaaaatgcaaagaatctgatatttagaaattatatacctatgtatatacccatctcattaagaatagctggttttataccattttaataaatgggagagaaaggactagcagtggccacacctttacctggtttatattctcagattcttgtatttgaaaacactggtgtccaaattgaaacaataaggtgagaaataatccactaaagaaatggttagatttctaaaatttaagttttccattattttgttgtcctttatagaaaaagaatgaacaagtcttggtttatgagtaatttgctaagaatttttaaatatttcaaggcaactatatgtagccctacaaattatagaactggtttaagtcacttctctgtcgttgtgaaaggtctgatgtggtcagggctgcaagagtgttttctgagttaagaaagggatgactttgtttataagcaacctctatctagatcacttctgattgggcaattttaaacattctgaattgtagctaatgggaaggtaggtttttcttgtgctgaatattaagatacaaagttgggatagaaagagttcttctcttgacccattaattgaaccactttttgaaaaacttttgtcatgatgagtttattgctaagagttaattttacctgcagaaaagaagcattctgagctatggggataactgatatctatagtcatcattttttaaggtacttgatacataataggatctattgcttcattcataatagaaaagcctacttagacatttgtagctacatttatattacaaggggtaaaatataactttgggtaaactgttacctatttttctctttcagtatcaattgagaaatataattatacaacgctatttaatttgcgtagttaacttaaaggaaaacttcactagtatgagttacctggaagatatgtcaatctgaattagtgaaagttctggaacataaattatttttagtgcatattgtcccctgatctatgttttacagtgtgagcaattaggtcagttttaataaatgtgggaattatttttaattacactacaacattagcctgaaattctggcttctggttacattgtatttctgctattgcttataaatggctacttccaaagagaggaaatatgttatgtttgaaggtaaatgtttacctgaatatgtttttttcacattattctataatgtgaggctgaacttcaaatgaccttgaattatcaattattctgatttactggatcctttattacatttgaagggtcatcagtaaggtgataaattgtaatgctgtgttcctagttacagagtgttcagaaggatgggactagttctttgtgaaataggtagaccctagatggatttccccagacataccatcaccgccctgccccccacacacacctgcacacacactgacatacacctcagtatctaatacttgagcatttctgagtgtttgccaatttaaaccttttccagtctcttcccttattcaaaaatgccctttaattttaaaaagttatgcctagttgttactgggactcttagcagatattatttaaaaagggaagttataaatccttatctttaaaaaatatataatttaggggaaaaaagagtgcaggtgtattgtaaacaaaggatatgttcagatggcaacatatgaacaacaataacttgtagtaaaccctgactagaaaagggtggcacaggtttgctgattgtacatgtagcgattgaaaaagtttttaaaaattgtatctttaaacctgtgtgtactgttagaaattatattcctaaagtaattgcctccttagaggaagatgaatgataccctgatcaggtagagaaagcatattggcagtggagtctgttgaccctcttagtggaagaaatgtctaaaattagggccagagttacatttatgggatctgagccaacaccattcattcctaagcttacattattatgcttaatatgccctaatttatgttaatgcccccagatctctctcctgactttcataggtactcatccaatatcctgttgtacatgaagatccagcactcaccacggcctccattcctaagctgaactcttgagctccctgctaaaacctgttttttcttccctatcttctatttcagtatatggccagcactattcacccagttttacaagccataaactgaggcatcattcttgtaactcctgtcccccaccattttctctcatactcatgttgcatcaggcagtaatccttggtgatcctacctcccgagtacttctcagacctacacagacctctgttcccactaccatgccagcttaggccagcatcatctcttgcctgaatcaacctctttttttcccttctccagtcttgccctctcccacaattcattcttcatatggtcacctgccgttgggactttactgtggatgtgtttatgaggttggttcccatcgtgacagtaggcaaaaattagctagggatagaacagagtacacaagtaaggattgattttgaatagaaaaactagggagaaagggggaagccttggagaaaactgccttgccacacagaaccatatccatagtgattaagacttctgactcatagaacacctgggttcaaatcatggctcttttgttagttgtgtggctgtgagatctttgcttactatttagaaccttggcttcttcatctgttagaggtagatgaaaatagtaactcattcatatagagctgcttaccggactaagtaaataatcatgtgaagtacctggcatatagtaagtgcccaataaatgttaactgtttgtattatttttattggagtgccgcctaggaataagagagttaagacaacatcatgagacccctgagtagcgaaataggaaggatgcaggcatataatgaagctgctattgccagcatagctaggaatgggaatggaagtgggaagaggggaaggaagacactgactatgtgaacaagtggctgctgaagacagcagttgtcatgcacttacagatttttctaagataggctccaatttaaaccaaaacagagaaaattaccttaattatttagaagtttctggttctgcctcaaaaatcttatttaccaaggtaactgcttaagttctccacttttttatttgtgttaacacaagggtttttttgcatggagaactattaccttacagtatagcagtctgcaggcatttagtaagtgtctggttcctttatttgcagatgggcatggttttctactaaagttggtggtgactagtggtaagtttataaggaatttaagttaaaagaaaagtatacataccaataccttatgaggaatgtgttttgtgaatgaaaattcaggtaaagtattgggaatatggtgtgacttctgcatgccctgattcagtggtcctgcaaaccaggctctcatgacaaatagatgttcccacctggggaccggccatagtcagtagaagccctgacccttctactttcccaagagctttggtggtctcagagcccactgtcctcaccctcttgtctgtgtcaagagctcacctgaaagtcaatggacatggaagctctgccattgcatcatgtagacttactatcaaccttcatgtgctgttctgtatattatttctggcttacttaagtggtgttactgctgagctgaatttattctacatatttaggcttttacaagctttggtgtccttgagggtaaaggtcctaagtaccatttatagcgatgatccagttgtagaaaatagcgtccttgaagatattgccaaagagcaattggcaagatttatttgcactgtgaaattttaattgcctcagctttagactttcaacttttattttgaggtcagtgctactcagtcatagaggagcagcactttggctgtgttgagagtgattgggtaataatgaagggtgttggaacagcttcacctagagattagctaaagcatatgtgtgcagaagcacaggatgactttgtccggagattgtgtcttccagagaggaggaatatgaatgataagatttaggcttcttttaagagaggccatgccttttgagttcagtgagggtagagctgcagcaagaaaagcactgggtaggtagctcatgtgtggcagaaaggaggaagggatataccattaaaggaaaagggggaaaaatacaacttccagaatcttaaatatgctgttgacaaaaagagctcacgtttacccctaaaagcttatggcgtctggcttcaatagggaacatgaaaggagaaaggcagaactacagaatgctgtaaaaaaaatctgtatgggtatcagctacattgcagactcactataatgtagactattgcatctccctgtgtgctgagttcatttctgtaaataacaaaaggaccttgttctaacaccttcacttataacaaggtccttgagtataaagtagagttgagcattgcagtatggctttagtaccattccacacatttattgaagggttgtcatgatttttaaaagtcttgttcttattttcttttcatgctgcttctatttcaaaggatgatttcatttcagttcatgtgggtaaaagtccgtaagttactacatttgtgattaattctgagaatcctcttcaactacactgtagtgagttgtagaaattttatatatagtgaacttgtcaaaaagaaactacaaatttcttctgtggctttttatttttaaaaactactgagcattttagtgaaaacatcttacattcagagaacatgtgaaataaaagtgtattagccagaggccaaaatggaacattagtggcttgtgtgcctgtactgacgtagtgttggatgccagttggccagacatgggaacatttagattttgtttctgagaggaagcagtgcatagccgtaagccacattaagttcattaggtgcaattgctacatcacacagttaatatagtgagagaaataaactcttcagtgactcaattctagtggcaccaattttaaccaatttgtcagacaattgagtatgttctgcatttagtatggatttaaaaaaatatggtgcccattttcatgtttggtttgtttggctttccagacatagttcagtttatgaagaagcagctattcactaagcaagtcagcattgataatgggggttgcgtttgttgctgatgtgtaaggaaggttttactagccaacataggaattttggaatatatctaggagagggttcatgatgtgggaaagcatctactatatcttggagaagtgtgtatatatatttgcttccagtaatccataggtttgtataaaagatgtaaaggttaaaaatcaccaaacatacatcacacaaattggattatagtcatgtttgttaaatgctgagattcaaatttgtagttatttatgcaaatgatcacattaaacatataaccaagtgacgctttgctctgtcacttaatatatttcttccaaggagcatcaaactttatcttcaaaaagcctgaagtatgacctattcactccattttaaagatgagaaaactgagtaagataaatgtggtaagaaatggagcaagaactactatgatggtggctgctcctatgatctgcattttctgcttttctgcctttttttctgtaagtttacatttatgacttcaaagcatcattttcagttctcaacctacctccaggtttcaaactgtatatccagctacttatttgttatctctacctagttttaactaaatctttaaattagattacatgggctactaaagcacagcaaaaactactccttgttacaatgagtcatgcagtattagataaatatgcagatgtgttacaggaccaggcaatagctaatgttaatcagtcccaaattagtgctagttgcaacaatttggtgttatgttcataattcaggcatacatattgaacatatatcgttatttaggaaaaaaaaagatcaaaactatgctcctgaaacaacaaaaacaaaaatcttagttaaaaaatgtctggtaatggcatggataagattgatgggttgacatggctgatgtctttcagaattattcctacaggagttatttaaaagactgaagcttagatgaggagaaatgtctgttgcttcttccctggaagcttggatatcaaagatatattgactcttttgactgtgattttggaatagttacatgaaacaaactcaaccaaacatgaataccagctttctgtaagtgcagtgcttcttagaaataggaaggcctagactgaatgacctccttatgtccttgctgtgatcaaagctccaaattcttaggaatgtgtttctttatactaataaaccacaaattcatccaatatagacttttccttcctttttgcaaaatcttggaaattattttgtaagataaactaattttaatttctaaagctgatggacattattttgagaagaaaagaagtatgttcttacctctagtttatggattaactctcagtattgtcccaaatatagtagcagcaattcaaaagatgtctttgtttccacttaacctgctattaaatgccaccttctccattgttttaattcagtttgagtttatcccaggtttgtgagtcaagctgatcctaaactggactagagtaaaattttcaaaattgctatcaaaattttttgtgaatcagaatacattgataaattaaaggagaagcaaatcattatcccaacaaagtggttgactaatcagttgaacttttgaaaagttgtgaatgagaccaccttagtcttccactggagccctgctcttaaatgaggagaaaagctgttatctttaagtacaagctaatgagaaacaataatctataattttaaaagatcaccttatttccagaacataatttgaagaggcagatattaatgatctacttaccgcagaactgatgcacgggaagtctaaacaacttgtcttggttcatactataaattatgataaaaccaagaacaccacatgatttcctagtgtttcaattctgaatgctgctagacagatggatttctcccttaacactatgaatataatgaatatcttacagtgacacatctgaaaacaggtatgtgtgtgtgcatgtgttggtttgtttgtacttgcatttacttttaggattgggttgggggaccatggactattgcttccctttgagtgtcactggctgttgtattctcactttttctgtgtcttccactcagaataaaggctgctgggtaggtgctccctatttatcaggatgcagctgtgcatttaaccagacccttctcttgagctgaactctctatcctgggttcttgtgacttctttcttggtatcacagggctaggtaatccaaagattaagtctgatctttggggctttatgctctgtaaaaaaatatattttcttttttcccctaatttttattttagaatcagggagtacatgtgcaagttttgtcacaaaggtatattgcgtgatgctgaggtttggagtacaaatgaattcatcacccaggcagggtagtgagcatagtactcaacaggcggtttttcaacccttaccctcttcctgtctcccctgtctagtagttcccagtgtctgttgttcccatctttatgtccacgtatacccaatgtttagctcccacagataattgagaatatgcagtatttggttttctgtgtctgctttagtttgcctaggatattggcttctagctgcatccatgttgcagcaaaagacacaattttattctattttatggctgtgtagtattccatggtgtgtatgtaccacattttctttatacagtccaccattgatgggcaccagggttgattttatgtctttaaatatgtgctgcaatgagaaaaaacatattttctacaaaatgatagaagtttaaaaggacaagtttatgggttagctaattggcttcccattttattctctaattctcttatattgacacttcttgagatttaatgttgtttgccaggaacatggtactggtattgtgttggtaaacagtaagcggtagaaacaatggtgataacatagattcatacacaatgtgcttttaattctttgaaaaaatagaataaattcaggagtgaattgctttgtaagttgttatttttaaaacttacctgcaatgaaagaggactgtcctcctcgcagaactagagaagggtgacaagccatctccctattcactgattggattcccagtgctactagttttgtgttactgaaaatcacttgagataattctgttctatgtgcaaaaaagcaaaaaagtagaatttagaaatccaggcctgctaatagctattagccatctatttattgttctgattttttttttttttttgagatggaatctcgttctgttgcctaggctggagtgcagtggcataatcttggctcactgcaacctccacctcccgagttcaagtgattctcctgcctcagcctcccaagtagctgggactacaggtgcccaccaccacacctggctaatttttgtatttttagtagaaacgaggtttcactgtgttggccaggctggttctgaactcttcacctcatgatccgtctacctcggcctcccaaagtgctgggattactggcaaataacaaaaagtccattttaggcaagcattatgactgtatcatatccaaatgaactattgaattatgaaatagatgctgtgagttttgtcttaagaagcaaatgcattttagaatctgctgtgacaaatcaatatcaaaatgtgtacaaaattacaagaacaaatagaatgttgtttttgactggtttgtttatattgaaactatattattttatgtgaagtatgtgtaatagagcattagatttgaaaactctgtgttgaatatcatttctgacagccttttttagggtcactaaaattccaataattcagtctagaattgaagtcgattccagagaaaaatttaatatagtctgcttgcctgccagcttcaacatagtttcagagcattgaaatggtttgacacattgaaatataaagtgcgtttgtcatatctattggtggagtattttatgtgatcgcatctaacaaagatcaagttagagtaaaacttatactgttttttatgtgtttgtgaagaagattttgttttatcttgttttctttacagtcctgatttgatttattgcaaagtccaataaactattcctagtaataataaagaaacacgttgcctgaaacaattttgaaatgtagtggaacatctctatattaccacaatcatttgccatttcaaagatccatgtgaattcaggattgtgtcacagaaggggtactttctaaactgagcatgaggttagaatacagtgtcaaattctgattccagcaaatagaaattgtgtaattagaggaaaacttttaaatctttgaacctcagttttctcacctgtaaaatgggggtgatactactaagcttacagggttttttggttcattttggttttttgttttggcaaaaatttatgttatgtgtataaccctagctcaatgcctaccacctagcagatattctctaaaatcctgttttacatttttatagcttctggggattacatttcatagaatgaaatctgcagtatatccaagtattagcatgctgggaaatactgactcaagtgtagtttacatctttggtaaaatactgcatttgatattgcaaaattaatgtaatttttctagtatatattcagtcctgcatgtttgtttatatgtttgagcaatttggggcttcttgtggtgagagtataatgataaagttgattttgtctcagataccgtattgagcacagattaaactggaatggactttagcattgtttagcaatactgtttatgtttttcatttttacatgtatacagccttatacacgttacctcttatctgtaatttgcatgtcttttttttttttttttttttttttgagacaaggtctctctctggctcccaggctggagtgcacttcactgcaaactctgcctcctgggcttaaacgatcctcccacctcagcctcctgagtagctgggactataggtggatgccaattttaatatttataaatacaagcagatgaacatttaagtacaactctaacaccagttccttatacgaaggctatttctgtgtcctggccgagagctctctgtaatagtattttgctgatatatttataacatattacgttgagtgacaaattcagtttaacagaaatgattttaagaccctaatcacttaacattcaattcatttaataaatatgttattatttgaatacttgagatattaaatattcttaatatttagactgtacatgtttacatatgactgatcttttatgatctgcctgtataaaatgatttgacagggttttaaatttaatatgcaatgagtaaccattttccaaagagtgttctactgaactcaagttccacagtattaaaaagttatttaaaagaaggtttccaggctgaagtaagtttagaaaacattggttaaacagtttttacaataggacttcttaaagcatttaattttctcattgctgaattttcacagtagtagtctgtgggagttctgtgatacgctgttttactaactttttgaacacaaaaaccttttcaattttttaagggtaccttacagtactaataatccttagaatatactttgggaaatgcaagcttaaatggaatgtgcaaagtttgaatttactttgcatcattaaaaaatacattgttgaagacctgcacagttcctaactttttaatactattcagcacaacattttttcctactgcttcctgggattcatatgttgaaaggcatttgaaaccaaatgcgcatttctatatctctaggttcagtccggggacgggaaccacaacagctagttgaacccggagagtttaatataaagaattgctaactaggttttatgttgttaactattaatagtaactgaaagggtaaaatgagactgctgacatagcagttgtgggaagcaggcactacccacaggactgcctgaaacaagagagaggttgggatggagggagctaaaactgacagatggagaggagagacccctgtgaggctgaacctcagacctctgaagagcgactttggccagtttgtctctgaagaggagagggatgaggctgatcctgcaagtgctggaaaaactgcaaactgaattcagctgctgcccttggaaggctctgccactgttggggagaagaaactgctggggtgatactcactgagccaggcagaaagcctgaagggagcaaggcccttcttcctgttagccatgcagtctctttgaatgtccccctacagcagagcctaacagggagccgctcactgggcccagaggcagttggccaagtctcagccccagcatctagggtagagcgtagaacggtgattttgaggctgataacaatagcttaataactggcacagttgctttataagaatccaggcttttacaaagaagaagctggaattatttaaaaaatagccctattatcatattggattaaatttgctacagtaattcacaaagcaaaccaactcactttataatttatatccccaggaactctattccattgttgccttaatattccattattaatgtgcaggtttcccaaaataaaagagatgtgttagtttgaatttactttgcatcatttaaaaaaatacattattgaagacctgcacagttccttaaattttctttttttttctttttttttttattatacttcaagttttagggtacatgtgcacaacgtgaaggtttgttacatatgtatacatgtgccatgttggtgtgttgcacccgttaactcatcatttacattaggtatatctcctaatgctatccctcccccctcccccttgcccgcaccccacaacaggccccggtgtgtgatgttccccttcctgtgtccatgtgttctcattattcaattcccacctatgagtgagaacatgcggtgtttggttttttgtccttggtgatagtttgctgagaatgatggtttccagcttcatccatgtccctacaaaggacatggactcatcattttttatggctgcatagtattccatggtgtatatatgccacattttcttaatccagtctatcattgttggacatttgggttggatccaagtctttgctattgtgaatagtgctgcaataaacatacgtgtgcatgtgtctttatagcagcatgatttataatcctttgggtatatacccagtaatgggatggctgggtcaaatggtatttctagttctagatccttcaggaattgccacactgacttccacaatggttgaactagtttacagttccaccaacagtgtaaaagtgttcctatttctccacatcctctccagtacctgttgttccctgactttttaatgatcaccattctaactggtgtgagatggtatctcattgtggttttgatttgcatttctctgatggccagtgatgatgagcattttttcatgtgtctgttggctgcatagatgtcttcttttgagaagtgtctgtgcatatccttcgcccagtttttgatggggttgtttttttcttgtaaatctgtttgagttcattgtagattctggatattagccctttgtcagatgagtagattgcaaaaattttctcccattctgtaggtttcctgttcactctgatggtagtttcttttgctgtgcagaagctctttagtttaattagatcccatttgtcaatttttccttttgttgccattgcttttagtgttttagacatgaagtccttgcccatgcctatgtcctgaatggtattgcctatgttttcttctagggtttttatggttttagggctaacatgttaatctttaatccatcttgaattaatttttgtataaggtgtaaggaaggaatccagtttcagctttctacatatggctagccagttttcccagcaccatttattaaatagggaatcctttccccagtttttgtttttgtcaggtttgtcaaagatcagatagttgtagatatgcggcattatttctgagggctctgttctgctccattggtctgtatctctgttttggtaccagtaccatgctgttttggttactgtagccttgtagtatagtttgaagtcaggtagcgtgatgcctccagctttgttcttttggcttaggattgacttggcaatgcaggctcttttttggttccatatgaactttaaagtagtttttttccaattctgtgaagaaagtcattggtagcttgatggggatggcattgaatctataaattatcttgggtagtatggccattttcatgatattgattcttcctacccatgagcatggaatgttcttccatttgtttgtgtcctcttttatttcgttgagcagtggtttgtagttctccttgaagaggtccttcacgtcccttgtaagttggattcctaggtattttattctctttgaagcaattgtgaatgggagtcactcatgatttgcctctctgtttgtctgttattagtgtataagaatgctcgtgatttttgcacattgattttgtatcctgagactttgctgaagttgcttatcagcttaaggagattttgggctgagacaatagggttttctaaatatacaatcatgtcatctgcaaacagggacaatttgacttcctcttttcctaattgaatatcctttatttccttctcctgcctgattgccctggccagaacttccaacactatattgaataggagtggtgagagagggcatccctgtcttgtgccagctttcaaagggaatgcttccagtttttgcccattcagtgtgatattggctgtgggtttgtcataaatagctcttattattttgagatacgtcccatcaatacctaatttattgagagtttttagcatgaaggttgttgaattttgtcaaaggccttttctgcatctattgagataatcatgtggtttttgtcattggttctgtttatatgctgtattatgtttattgatttgcatatgttgaaccagccttgcatcccagggatgaagcccacttgatcatgttggaaaattttctttttttaattgagacagagtcttgctctattggccgggctggagtgcagtggcacgatcttgacttgctgcaacctctgcctcctgggttcatgcaattcttgtgactcagcctcccgagtaactgggattacaggctggtgctaccaaatgtggctaatttttgtatttttagtagagatgggtttttgccatgttggccaggttggtgtcaaactcctggcctcaatgatccacccccctttggcctcccacattgctgggattataggcgtgaactaccatgcccagcctagttcctgattttttaatgttattcagcacaacattattctgctgcttcctgggattcatgtgctgaaagtcatttaaaaccaaatgcatatggattcaagcagaatgatgccgtgctgctgagaatctgtgagacactaatatgttgtaaggttactgccttatgagagacttgggtatttgacaaactttgtgggttactgaaagggtacttcttataagagtcatcagtaattgagaaatgctagcacataaatgcaatcaacagatgagaacaatcctctctgtctgagccttccatttacttaatgctgcagcaatgagtgttttgagcagggatattgtgggcttgccttatatgtcatggtcacgttaaactctacttattgacgagatccagtttgacatttatagtagctgaagagaaaccaagaaggcttacaagtcaagaaattaaagcagcagcttctaatgtaaaagaagtctcaacaatagaatatgcaatatatagagagtttatatgtattagggtagattacaatgctgtaattaaaagatgcaaaaatgtataataaaaatgaagagcagcctgaggatatgggctgtggaaaagttaacttcagacgatgggagaaggagaagttcatgaccacaacaaaccaagtaggatggaagaaaaagattcctattctaagaaaggcatgatagactagaatctcaagaacaaataataattgtaacatcactaacattattgagtgcttattgcaagccagtctttgttttgagtgctttaagcatagtaaggaaaaggttaatatcggaaagggataggtggaaggtcctgtagactgtggactgaaagaaggctgttcactttgatagttggtgggtgatttgggacttttgagagaaacgtttcaacacagtggaaggattagaaactaggtttcaaaggtttaaggaagtaaggattaggaaggaggtaggtgcagtgaattcaggctagtcttcccagaggtttgtccgtggagaaagagaggtcatgtacccagtcgtgcttttgcttagtgtatgtgactgtatgtttgtttaaaaattcacaaggtgagcatataatgctggtgtcataagacatcttttctgagtctgagattatgatgggtcaccaacttctttggtagggtaaaatgatgtgattatgaaaaggactgtgtgtgtcctagaaggtgttccatcttaactagagacattgagtaaagaaagtacctagaaatgcaaactatttagatagaaatcatccatatgtgttacctaaatataaaaataacttcaaaaattgttcattgtttttctataagatggtcatcacccaatcttggtcatatatgcaatccatcagggatttgttttgatagagactttggtttccatgtacagtggtttataagaaaaacacatgtggaaaattctatgaaggtgacctgcatctatctgatgatttggcccacatcactgctagggagaaatctctatgatagatccttgatttgtaaattaaagtctattttatagactttaaaatgtcttttctagaaaacagaactccatattttgggagactccaaggtccctcacgagtacttcaacaatcatgtttctgtatccattatttgcaatacacagatgggagcctcatccaaattgtcatttctcttaaaaaaagaaaaaagagtcagctttaaaatctgttgtaagctacttgggtgccttttagtggctttttggaggaaatcactcaaaatgccactcttctcagtgagagcagtttcccagttgtgtcacaaagggattatatctccatattttactgaactagctccctacataattagctgataatttagaagttaaacagtaaacatgctactttctgttctttgcaaagctacccttgattcattttataacaagagctagtcttgcttaggaatgttgtaggtactaatttgcataacttcccaagaacttcaggatgagcatgtgttgtaattcaaattggaatcaaatttaagtaagtttacttttgaaatatagatgtatgtatatatatttaacctccttccaagttatttatttgatagactgcatatgcatttcttcctattaaataacttataagacattactaagataagtgctatattatagcaatgctagatgctttaacaaaccttaaaatttcagtagcttaacacaagagttttttattttcagaattttcccacatgaatgttactggtggacgtgaatttactgcttctccgaactgacaaaagttgtgccaggcttctagaatggcagaatcactctgagtggtgcctgttatcccctccccacccacccatcacctgggtcacctggagaagcttataatggaccagacctagaagcagcacgcaaccacttctgctcatattctgtctgctggaactcagtcacatggtcacattcagtttcaaggcaagctgcaacatgtagtccaaccatatgcccaggaagaaaagtggtattttggtgtaggacctgtggccaaagtattaataaatattgatttttagaaggttttaataggccattgctttgtaacagaatatcacacaaaaacatgttctttctttataatttatgtgcattcctctctaatccgttagtattacagcattatttaaaaaatttgacacattatagttgttcgtatttatgggggtacaatgtgatgttttcgtacatatatgctgtataatcatccaatcagggtatttagcatgaccatcacttcatgcatttatcatttcttggtggtggggacatccaaaagcctctctttagcattatttttgtataataatctggggaggagggagattcacggctagaggggatttgactggggatcatagtcaaactctatttgagatctatggctgtacttatagacttacctgaaactgactgctgggaagcatacctgaggactctgcctctgctgaaggtgtcacttgctattcctagtaagtatctactctcatgacagagaaataaccttgctgctgaaatgtttacattagctgagatggcaagagttgttctgtgtaagccaaagagtgcagtgttaatggtgtgtcttgctatggcgatttaggtttgattgtattgcagaatagccaaatttgtgttttgcaaaaatcaagatcctttctgaagacttgcttgttccttagatgctagtgtggaaatctacttgtaaaaggccatacatttctgagacagaacaaatatcttactggaattgtaaccttatttgatagaaatttgtatcttttacttagtaaagtcataattaatatttctgttggtattagtaaatacctggaaataatttttgtcataataaatgcttgtcaccagaagtaaatgaaagcagcaaattgattatttactgtcaaaatctttgacatttttgtgtgtcagtgactcatttttccctttcacttccatattaactgacatagaaaaagctttaatttattctctcactacaatttaggcaggattgagaaatagataatagttataattattcacaggtgagtactcttccattatttcatcaaggtcaatgttcacataagttaaactaaatctcaagttttggggagcatatttccagtctatttccctcttttcttgtaaggaattatgttgaatgactttcacataattgttgtctttttttcctctctctcagttcaaatagtatatatcacattgtatttcatatactcaaaaatactttaatattatataatattgcaatattatcaacattaatataaatatgcagtagtatcaacaagtatctttagctatgatggggattggaagtgggaaagtatacttaaaaggaaaaaaggaaacattttaagtaattattttgaagttaattgatttaatgacactataacaaaagtctagaatgttttatatccctattctccttcaggaagaactatacatgtttttcacaataaatttacagaaaatgtttatctttgtggttgtattctttcatggtaatcttcaaaatatcctcatcaaccactgtgctttttccatacggtctgtcttatatgggataggcaagttctatctacaaattaaaacaactttcttgttataaatatgcttcttatttcagtacgatcaacaaaatgtttaggagcacaaacaaattcattaattatcttttgtatccagggcaaaatatagcaggcaaattgaaaaatgaattgtttatttttggagggactgggaataaagaacaatgaaacttccaaataaaagtagttggacctttttgctgtggatttgaaaataagtccagaaggctgagcttaatataacatgtggcaggtggcctgcgtttgcctggagaattcctttagggcaagacagctcagcaaacacataaatccttttttctctgttatctagtagcacatttagttgccatggggattttatttatgcagcagatcctctgcagttcagtttgtgcctaaagtttaaccatacagctgttaccataaatgctacatggcaatattttccaaacacagaccctagaacaaaaagaacattttttttccagcactgattttgctttttatgttctgaaacatcttagtaaagtattactatataccagcaaaacttcacaagttttcaggcaagcagttggtatcatgtaatgttacttaaagtgttcaattgcaaataaattacatgaaaatgtagcaaatttattttaggttaggacaaaattttgcaagcttaaatgagtagctttttagtactctctatttttaagaggatttgttttttttccactgccgttatttcttaaaggagtttagatcaaatgatacgtaagacagaaatgcttgccaatccacaacttctccctttcacagctcttttaatattttttcccactatttttagtggaggagggaggaaaacaagataggaaaacggtgcttgctgttgcaacaatcaagggacatgtaagtttctccagctcagggctaggtcctgatttggaatgaattgcttttgtttagtcttgatttgtactacaccagataagtcaccaatatgtctcctttgtgtgaagcagcatggattggtcaatgaaaaggggaactggtgcttttagatggagtgcataaaattacctcacaccatctgtgtcaccgtgcaccaggaaaatgatgaaaggaaaacttgaaatccaggtaaagttgctcccttagaaggaaagtaaggcattcagaatcaagatctattgttcacgccctactcccgcattacatttctggtaggtgatgttgactgtttcagagaactatagagatgtcatccttacggatggttctgctctagttagagggtcaatagataaaatttgaaatgataaactaaatgaagaccttctgtttaatgccatatattcttggcagtaaccaagccatttaacattaaaactgcattgctatagtagcagtcattaaagatcatctctgctaggagcatatactttcagatactttgttttttttttgagacagagccttgctctgtcacccaggttgggttcaagtgattctccctgtctcagcctcccgactagctgggattataggcacccgccaccaggctgggctaatttttgtatttttagtagagatggggtttcaccatcttgaccaggctggtcttgacctcctgacctcatgatccactcaccttggcctcccaaagtgctgggattacaggcatgagccatggcgcctggcccatactttttatttctatcagaaatggccacataaatctgaaaatgaactttgatacgattaccggaaccaactagagattttaaatgacagctattgccaacttttgcttacaagatggatactctggcattgagggcactacatctgctatgagaggtgaccatagtctgttctcattcactgcaaatgcttagccagtgtgtcatatcacttcttaagtggtattagacaacaaacatacatgcttccttacacccatccaaccaacagcgatgttcaagtgttcagttttcattgtgatttattgagaaagggcagcaatataactgactcataatgacacgctactcaaagtttggtccatgggctaatagcattggcatttcctgggagcttattagaaatgtataatctcagctctcctccttctcaagagatactgaataagaatctgcattttgacaagatgcccggatgattcctatatccattgaatttgagaagcattggtttttttaaggctatgagcctcaaaattagagagaaaactacactaaaggggaaggagaagtatgagtttatcagctattttaggacctgctagtagcaggacgccttagcactattttcattcttcttttgtatttttaattcacatgcgcaaactctagttcgtaatgggtctgtcttccatcatttatccctcctgttcggtgataattactgccaaaattatctttcagaaatatagttccagtagccactacattactcagaatgtttgaatccctcttcctttgtctattggctcaatctccctttttgacctcttaacagtcagtcttatgcacactgacccaaaatcaagtctgtcttatgcacactgacccaaaatcataccaagtgactcatcatgccctgagcacattgtattcttttacaacttcatggccttgcgatgctacttcctcttctgggaatatccttttatttttcacctgatgacttttattcatacttgacgaaccagttcctacgtctttgagataaaacatccatttgtaggcagacagaatgagttgccctctccatgggttatctgtagcatttaggccaacctctcacatggcactcatgacactatattttgtttatttatttaggagtctgactcccccactagactgattgctccttgaaggcatgactcttgttcactttacctgtataatcccagcacctgggaaagtagttagcctatagcaggtgcttattgtttgttaaatgaatgagtgccagattgtttaaaaggacacctttttagcaatcagaactgctagtgaatggagacttcagagtaaatcagtctctgtctctctgacataactttttaaaaagaaaaatattgttctcttctgagagaatcatgtcagatatcctggaaatagaaagtataattgaaagacacagaaagtagggtatgaaaaacaaagtgcctgaactgagaaattactgaagcttaaatgttcaattggagagaagctggtacacctgagaaaactcaggtgaattaaaaaatgtatttctaaggatttgattatacctcacgtggaaattgtatctcacttattactggcagaggatctgatactcagatgacagaagtttatctttgaaacaacacataactttccatgagtaccctaaaacagtgtattttacttacagtgtattttcatgtgtaccaatgaaattactgtgttaatgtatcactgttaaaatagaagaaaaatgagcacgttggatttttcttcaactgcaaatggtagtagtttgtatccagctatgattattttctgttggtgtagatgttcacttagaaacagcactgggctgtaaagggatgcctttctgattctggagcagacatgctcttgtacatttacaccctgtttgtcttatccctactgctgtaggttgaatgaattgtggaatttctaagttgtgctgtggaagtgtgaaatgaaagttttggtatttcttcagtaaaagtgggaaattggaactatataaccatcacctttctccagaagagggaaactttagatggacttatcaaatctaatttgaataactagcaaaaataaggctggcaatgtcagggttcagacattgccacataaatcgatgacatttcaaattattcaactcaaaaaccacttatttttaattgattgatattttgccaaacaaagatcactaaaatgactttggggtttggttctgctaatactattatcagtgatgttgagcaagtgttttaaggaacctgtgatccttacagttcccaccttcatgttgtgatactcaggttcaaacgatctcaaacttatttttttacttcatgccaggaagggggctcaaatgtttaattgcctacaggtttcactcttaacacaaagcttggtaggtctcaaatatcctacaccttataagaagactgagatggttaaggggtcagcaggagaaacagagactgagggaaagaagaaagaaaataaaacttaaggggctactttgagaaaagttttcttgaagaagtcggtaagagatcaactacagatttttattgtggacgttttgattataagatcactagaataaaaaggttttcagttaagtcgaaaataaaacaaaacaacacttttagtcatgagtgctttaggagtattatttatttttaaggaaatatttattaaaaacctgggaaatactggccggactgtcattgctgcacacaacaaagatataccttttaaacaacattttattttatttagataaattaaataaatttagataattaaataatagtattttatgtagaagataaagaactatcagaattagtactgtaaatggtccatgataatgtgcttcagcagttactttagattatcatgtttagatcatcacgggagacatttggggtgtaaattggagttatggggatttgggggacctactagagacaaagtggggagccacttacctgccattaatagggaccaagggagatgccacaagagcaccgtgtcagggattttgtggatattgttcattacttgactaggagttggggtgctggtaacacaggataattatttcagctgtcccatcctttcagtgttttatatgccacctggtccaggcatggtgattaataagcattgctgaagtgggtgggggcagggagaaggagcaacaactcaaaaccaaaagaagcagtggagagggaggcagaagaaaccactatctgcctaggcctctgtagcagatagtcgggaggagaagcagagttatatgtaatttcctgataatatgtaggccccaagaaaaagaaaaaccaagtaatgctggggaaataatggtaagcttaaaaacagataaggtaaacaccaaactaaaggagagagattaacaggtaagtatattcagctgttgagtttcttttttggcagccttaaaatcaattagtgtcaatgagttgaattccataggctggcagtgttttctgtgaagttttttctttctttctttcttttttttttttttttttgagacaaggtctcactctgtccctgagactggagtgcagtggtgggatcatagctcactgcaatctccacttctgggctcaggttgttctcgtgcctcagcctcctgagtagctgggcctataggtgcttgccaccatgcctggcttatttttttgtagagacagggtcttgccatgttgccctggctggtcttgaattcctgggctcaagagatccatctgcctcggcctaccaaagtgctaagattacaggtgtgagccactgtgcccagcctctatgaagttttatagaggaaagattgtgtacatttctttgggaaactagactgcttttttaaaccattatccccccaataacatcagagtagatgcttggagtgaaaagattttcttctggtacatgggatgagaaagggtgagttgtcttttcctctgcattgtagaggcagcgtagcataacaggtaagggaaggcagagactcggaagccggaccacttatatccaaattgtgactgtctttagttagcaagttacaccatcactctgtgtctttgtttcctcctctgtaaaatgaggataatgctactgctctctaaagggttgtaaggattaaattcaatatcatgtagagcagatatcacattagaacaatatttggcatgtcagtactagatatttttattgctaagaaataaggactgaaagaggcatgttaatggataagaaatatagagaaacatgagattgatacatgtatcctcaacaaaaatgaaagctatctgaagactaatgttgggagaaaaccttaactcaggagaggaaatagatgagaatatttcaaagcagaatatttaaataagagggcaagacactgtcttttaagcagactttataattgagtataaaataagaaagatgtttaaacatagtgatcaattttggaaaggaaaaggtgttacaagaagaaaagggcaatgataaattgcataatataaagaagtgaaggtaccattagcttttaggattcatggcaaggaagatgccttaggaagctattaggaggcattcaaagtacatttggaatagatgtagttcaagagcctggagaactacctataggaaaacattgacaggatgataggaaagaagaaagtacttaaaggatggagaaaaagaaatatgtgttctttttcccactaaaatatattagctgcttgagtgcagggacttttatcttcttctttgacttctcagtgcccagacttttgcttggcatgtaatgggtgcattacattatttaatgaattcatgaatgaaggaaattaatggattaatgaaggaattaagtttattaataatttttataagcactagaaggaagtaggtcatatatgagatatgatttaactctgaagtgtaacggaatttatttatgggcaatagaaaagagtgaaatttatcttcagggtacagaattagaaaatccaggagtcgaggaaatgatgggagatattttctcagaattactcagataaaattatggaacaaaaaatgagatttttttttcctgacaattcagttcaggtgttaaggatatagaggcaacagtggctgatagaagtgtgatcaatctgtgagcaaaggcagagtatttgcatgaggacgttactcacctctgaactttatcgagaactgatgattccatagaaatccttttaagaagttcccgatgtgtttttctttaaatgagaatggacaaaagcctgtgaaacatggctcagctgcttcctgtttcatatatgaaaggccctggacatggtcaaacccagggtataaaatatttgtgggactattatgggaacaactagaagtaggagttagaagaaagaaacaaaaatctttaaaccatacatgttaggaaagaggatcaaacttattacttacttaaaaatagtaatgttttagatagactagttacttttcataaagaaaacatgttaaatagcataaaggaatttttaaggtaatattaatacagattatttccaatttgggtaatatgctttataagggctttgaacacaaatggcagttgatgtttctagtgaattaggaaaaggtaaaggtcacaagaagagccgccatttagccttcagctgtgtgaatgggccatagatacctcacgagaaattaactggcaactttaagagccccatagcatgctagttttcaaactgcagtcctctctactggtggtgcattgttcagttttaaaaattaatcgacttttcagttttatatttttcctaatagcttttcttttctttgatatcaaccactacttatctacttgcaagtggcaatagaggacagaaagactaaacagtaagtggtaaactgcatgcattctttcattcagttgatagatggtgtctactgcctgctggacaggctaccacagaacaaaatggatgccgttcctgtgttctaaacttagtgtagcagaggtcttacagctttcttgcactgggaaatttcctagaaatgttgaaaatgtagatccccagatattactctgagatggtttctgttagctgtgtgtgcagggctggggatgggagattgtggaggtgcctaatccaggcgggtgggtggggagagctgaccacagaaggatttcccagagcaagaggcatgaacatggagaagtgatggatgggaagggcttggccaggatgaaagggtttggatggtgtaaggtaatgaagagagggtggcagactgttctagacagagggagaacaagtggaaagactgtggcagctcatgcccttgttctacttggtaggttcctctgtcacttaatattgtaacaagcatgtacagaacacctcctgcaagccagactccacttaccactcatgttgagatttgttcccaacctcagagaagttcgtggttgggcacatatacctaaacatgtggcttaagtgatttaaaatagtgaaatgcttgttgattacaaaaatacatgtaacacatgtaagctgtaagaaataaaatatatatctctcacttcaccgctcaatttaaaaaactagaactgtagtagtattattgaagctacctgaatttcctaattccatctccactgccctggctctccaactgagagatcttgatttttttcatttattgttccctgcttttgaaaaaaaaaaactctaaataaatgttttggggcatattctttgggacttcctttatacacattacatcctctgtaaatggcagtttggtttttgccaccgttgtcttgtttctgattttaaatgagatttttctgatattcagccaccaagctttgctgtagttttttcatggacatttcttatctagtgaaggacctcccttttttgagtatgctatgaagtgtttggttttttaattatgagtttgtgtagaatttggccagatgatttttctgcatatattgagaatatgtccttattttacctttaatcttttgatgtggtaaattacacttaatgatgtttgtagtgttgcatttccggcataaaaccaacttggccacgctgtgtctcttgtgttagtttgggctgtgtctctacttgtgttactttgggcttcttcctccaaacaagccatgctgcaaaaaggataatagtttatccctgctcccttatagaaggaggttcagatcctgcattttacggacttgggtcttactgtcctagaaagctggcaggtactgagcacaaaagcaaacattgagaagttagaaagtttctggagttctcattgtattggtttctagttctttactctttttagaggagaaaatagataatcccatggctttggaggatgtgactcaccttcctgaatccttactctgtgaataaacactcttctgaattcagtaaaatacatttccctttcctcccttcatgatagatccacttgatacaaaatctcaaaagaataaataggcaatttgcatcactaagacttattaagggaggcatagatttataaatttcttcctggacaaggaaatatttggcctcgacttgtgttcactcagtaattatgatgggattctacccttgttaataatagagaaatggtaaaattttattttctttcaattctctgagaaatgtacaaagctgtcacagcttaatgtcagccataaaaattctggagtaattaaaatgcaaaaaagctgtaaaaattagtgaacctcacttaaatcccagtggtactgtttttggtggaaggtttaggacatctaaaacaatggaagaacgaataaaagcaaagacaaaacagataataagtaatcaaattggtttatgtactttaaaaaatgtgtattgcatctgtctaccaataaatgtatgtaggatctgtgtggaaaaatatttttttctcaatcaacaatataagttaaactacattggaggaaactggaagagatttttctgttcttatataccagaaatttgttatcttaaatattgtttgaaatagggtgttatgaatgagttagaagcatgtgttgtataaagataccaattttatgactaaaatactattcgaacagaataagatacttcaaagaaaattatgtgaaattatgacttttgtgctatatttttataaaagtagtgagtggctggactaatatttacctgtttaaaaaacttcattgtattccatacccagtgagtggtagatgagtttttgatcactgtatttccacagctaaatggtgccgagccagtattgtatactcaatacatatttgaaatgaaccaatgaatgaatgaattgaatacattgtgttgcttctcacagatgtgtttatgaggtaatgttaccttgtctctggtgttacttttacacataatgccctttccaaccagagaagtaggtgatacttacatcttagacaaagtatcgtatcagaaatggcttcatgagtgttttcatcaaaactggaaaatggttagccatcatcctccatatgctcttttcatatactgacaatctctttttgtcacttttgacctcattccaactaatttcagtcccattacgaattttccacaggatttttttccaggtttttgtaacctggagaaaagccccacagcagaaaccaggggccaagatttccagtctctcttctgcagaggactccctggatgtggtggtggaaaagttactgcagctctgggctccactcactgattgaaacaaataatctgtagcgtgcttctcattttagaattctgtgagtctaagagtaagaaatttattaatgtatctcttttctaacaaataatgaaaatagggcattaagggaaagagagaaataactatggggtttatcaaccattgtcagtgtatgaaaaagccatctggacaatgatagctaagcactttcagagacttctctaacacatgtgaatattgatagcatatccaaaaactgcggtggttttctgaattaaagaagctccattttcatcactggttgaaggtgcctgttcctcataagtagatcttttttgtcatttttatactcactgaaacattaaagcgtgctattaagtttatgtgcttgtaaagaaatgtctgttattgaaaaattcctgtgtcagttgccaaggatagtttgtatcttccacacattttagtctatttggttgttcccaattgtagtagttttagaatccaacacagttatggcagtagtgaataactagtacattttgggcagagcaagcacattcataataggagatgtagaagtgagtatgtataaaggatcccatgttcagaggtagaagattttatctttaaaaagtaaagatattagttactttgtttgctataataatatatgaatgactagcttggcaaaaagagaatttgcgataattttcaaagatattttaaagatttgactgggtgtttttaactccttgaactgagatcaatatattttactcacagtttcatgattaagcaacagatcataccatctgtgtttagcatggctccctaatagtgtgtaacatgtagttttgtcacttttaatttaggatgttattttttccctaaatgacagaagtgctactgtttgctaagcagtctgtatgtgttaacgttttttctggtatagcaattataactgataaggtatccataattcatttaatgcagtttcttaaatggccaattccttctttatgcgtacggcagaccataatggaggatttgttttacttctgtttaatggaaataatttccttttcagttgactgtcctcttaaatctccttaaaaataagttactctccccccttatttagtctcatttgtagacttagacccactgtctcagcagtaatggaactatccttagagccaggcagaatttgccaacacaagtgaagatgttgagaaagcgaatgaaggtgaagaggaatagtctttgaattgcaagattatttttcctttccctgaatgtgaaataaatatgtgattgcataaattaagtaaaattaagcatgattaatcattgttatttctatgacatctgagattcctttgaaatcaatgatactttatggaaatatcaccattctaattttgtaatcacattgtatgttttggaatctttatgctgtttgtgcaaaaagggcaaaataacttttataacaagtgaatgggggaaatgcaattattttcttatgcttttaggaggagctggcttcctagtcaatttagaaaaaagtttctgagttgatgccatattttgcttatattgtatttttattcaggttcttcattttgtaacaagctaaatgcagaaatagaacctcagtattaataaacatcattcttcacatccactcttgacacagcatctctctcttcctgaaattcctatagaagtgtgcatgatgatttgaagcttgtgttataagaaaccttcaatttttcagccaggacaggctttcacttccagaagggacaacggaagcctcagagatgggtatttattctactcttaaagatatacagagaagtttcaaaccatccatgctcaccattcagctgggctttattatctggcccaagtacctcttatgagagttcccttgttgtcctctacttgtcagtacacatttggagcaagtctacataccaggttctgtgggagtttacagagtaagtaacaaagacacttttttcctcaaggaaaaactagtttttagtctctcttgtgtagtaaaattttatatgctgaaacagtcattaggtcatctacttgtaattagaccactttgtcttctggacaaaataatctaaatattagctttattctagatttattgataatcctttaaacatttggcttaaatgaccccatttgatattctccaagttctccagctctctctcaagttcagtccaattgagttacacccagccatgtgttcatctgacttccacgtggttaagcagatttttataaattctgattaacaaaacgcccagctgaggttacatcctttattttacatgtacagtatttaatataagtaataaatgttggggtttgtgtatctgcctctctccagatacatttgtagagagaaacagctattagtttatagtcccttttttgtcatctaataatcctagtaattatagaaaatacggcaaactcatcctagccctgctgctcgtatgtgtgcatgtttgcgtgtgcatgcccacacagaggaatgtaagttagtctgccaatatttgataaatgcctattatgggcatgattaacacaaaatctctggcttagttggtaaggaaggggtgttaaaaagggccacaataaactgtgttatgcactgaggagtaaactgggaacgtaatctttgagccgaagcttgcaggatcaattatactttatctgatagagaaagtgggacaagtcatgtggagagctggttctttaggaaaattataattggtggcaaatgtcaactgtgtctggagatggggctgaacaggtgattgagaagggctgtccttaggagctgaaaccacagagaagaaagagccattatttaagtggttcatgtattcatttaaactgtaaacaatgtagcaattggattggaagctggtgggaaagggagtctgggaagcagatatggaggttaccttggtggtccaggtaacttgcatgaagaccttggattaggcaatggaagtggagatgaaaggaggtgtgtggactccaaatgcttggtgactagtttaatgtgggcaataaaagaggctaaagttgagtgcctctggttgttctagcttgggcttctgagtgctgaagagacaaacttagggaggcaagggtagtgaggcagagcgaagggaatgagtatccagatgattttggattttcgagttgtctgtgtacttgtaggaagagactagaagtcttatattttaaaccatacatacctgttcacttaatgagaaaataatgagactacaagtttggtcttgagctcagaagagaggttagagatggaaattgagattgatggctgaaatcatcaagaggcaccaagtgctgtgggactataagcacgtagatggatccctcaggagtgagggatggtgagaagacgggaagttcaagtgtgaggggaaagagccttagaaaccaaggaaacatgttcatgaaggcaagtacagttgatagtaaatgtcttgtgccacagaaatggaaaattgacaagatgattggataccttaattaggacaatttgactgaatcatcagtgttcaaagccagatggtagtgactttagaagcaaattggggacagggaaataactaatatttactgatacctgttatgctgcatacattttattagatacttcttggttttcctgtttaattctcatatgaaccatgtgaagtgggtattttgcacataagaaattgagtcttaagtgtttgtccaaactgcacaactaatatcatagtaccaaagtttaatttccagttattactcttaaattaattggtctatgactgtgattagataggtgggattattatttgttaataaagtacatatgacttatgaaagaagacttctatctgtattctgtccagtagtaacacaaaaattcccactccagtgttactcatgttatcatcatataattggtagcaacatagcagtaagccaacaaatatataataaattgtattataggcaccaagaatcagaatctcttatgaaggcaaggatatgcacacatacactacataaaaacacaagaggggctttatcttaaggcacatctgacagttatgaagggatttaggcactatatgagacatgaaacttgataaataaaatattttattcagaagatattagcaaggcttttccctttttaaatgtacatcactgagtcgttaggaccggtcagaatttggcagcattctgttcatagtcataagtgtgtaagaaggcattggttaagccaactactgtaacttcccaactaaactctaataattgctatctaatgaatgtgtaagtgccagtcaatgactaataataaaataattaacagtcactggtaaaataacattatgactgcaatagtaaatagtaagaaagggcatttatacctattgtaaacttgtccgtagtttgtagaaaaggtgacaagggctgagcatttaatcagactatgcaaataatagaaaagtggaagcttttgtaagaatgtagtttctatcttatgtggccttttttcctagaggtttacaagctttaaagctgcttcttggtgacatgatatagtgtccaaggaaggggagaagccacgggcattccagatgattctagtccatcaaagaaaatttcttggattgtggtccaaaagctgtagaaaacaagttgtacattaggtgaaggcattagggatcattacagaaatatatagcaataacttcaaatagaaaaattaaaggaatttgcaactgaggggctagcacatggtaaagttcgctttctataagaaaatgaggggattcctctcttttggaaattcattgataaactacacttctttttctacctacaaaatgcaaattgactgctatttggaatctgacaagtgaatttacacttacatatcaaatcttttaggaatttttgggtgattttcttcttgggaatttaggatggacagttgaacttttttttttttcctttttctttgatgagattctagtcatgttttagtttatatcatagcaaagaggttttaaatgacctctttatgaatgcagttgctactgcttccattcgcatttcccttgatctcagcatggcttttgacactgtcaacggcgctatcatttcagagtgcttgagggaattttcatccttaaacactcaattttacatcaaaataacacttgaaaagcacagttttgtaggcaaatactttatctaaatggttttttcacggatactgaaaattctacttagttaaaacaacagcatatagaggtctcattattttaatttagctttggagagattttccattttatccagccaccaggagctgttttaaagatgctttgcctgtggtctgtttggttttccatcagcataggtggcttcatgtaagagtagtcacctctgcctactgaagtgggcaacaagatggacccatgaagctttgttttgaattagaagttactgtttagctgtggtgtattgctggtatgaaattagtgatttctgtacctaataccctattactgcatttacctgttagatctttatatggataatgacattttgaaactttctcctagtgaatgtgcttaaagactgattttttttttctcataatatgctggttaaaggagaggcattcacaggtatagtctggctttcagctgtagggcaccccaacttttagtttcagtgttacttcacaaatagagctcttactccaagattattggttataaagctagtgccagcttttgtgctttcattgcatattatgtctcgccaattattaagacttataaatgtcacttgaaaaatataactatccttactcttcatgtaatcctgtctattgtgaaagtctgaaattcacttttggtttctggactccacagctattttactcagttggctgtatgccagcaacccttttctaagcaatccctgaagttatagggacaagtaaaagtgaggagaacttactcgtaaattcggacaaaccaatgttgacctttcagcaaatgaagagatgatggttgtggtagctggtaaggtagggattcagagtggatttcctgacttaatgttgaaatgtgtttcttcttggccactatactgtttggaactcatcactacaggtttaaattagagaactatatgttttcagtaatgggaaagaaatttttattaaaaataagacattcaatgcattttaccataaaatagtttaagtttattaatcattgctgtgcaaaaattgcatatttctttgtcataagagaattccaacattttataataagtcaaaaaagctgagcagctttttgcaattctgattatgaaaagcaattgtgattattttggatttgggtcattgattacaaatatagcagtctgaatttttcagtgggggttaaaaaaaacaatttccctcttgactcttttggatttctgaagaagaaaaaagggaaggaaaagaccaaaagaaacaataaaatactagcattggagtgggtcggggtaaataattttaaaatgaatgagctcagccagttccagcagccaatgctccgttgaaaagaaatgattggtagtccatctccttagattctgaacagaagtggaggacactttttacagtgaaatagacctcatgtaattggaatggatccaaaatggttttccactggacacaataggttgtcttatgtaataaaagcagcacaagtagacatggtgtaagtggacctaaaagctctgagctgtggccattcatgtgcaataactaccttttttcttttttttttttttttttttgagacagagtctcgctctgttactcaggctggagtgtggtagcgcgatcttggctcactgcaacctccgcctcccaggtttaagcaattctcctgcctcagcctcctgagaacctgggactacaggcgcacaccaccacgcccagctaatttttatatttttagtagagacagggtttcaccatgttggccaggctggtctcaatctcctgacctcgtgatccgcccaccttagcctcccaaagtgctgcgattacaggtgtgagccactgcgcctggccaaataaatacctttttaaaatgaaaagttcttcggttctgaaaaaacacaaaacgacaaccatgtccatgataacctttaacacattgataatgcaggctatgagcagttctatatagttttctggaatttaggactgcagtaataatgacagtaactcagttttaatgagataagtggtaggatcaccattttacaactgaagaaactgagaccctggggtggtgaaactcaccccaagttgtatagctagtcaacagcagacctgagattggaaccagtgagccttatttcaaagtctgtgccttgcagcttactttctccaattgtcacacaacctcttacatctcaggcacttcttgatgtgggtacttgaaagatttagtttttagctattgcctttgcaatacaacagcaatggcctttgcatctgggattatatacttcgtgtatctgttacaaagatgatgggagcaatttaccaataccgctttttcctgatctatggaagaaggcagttttaattcattgatttaactttgttgtaatatgctcccgaaggaccaggcttaaatttatagaaatttcactttatttttcttcgtggccattgattaaaattgagatgaatgaatatgccaaaacttcttggctttttctgttctgttgaaaaatttaagaagtaatggaagcccagtgtaatcaatgcaaaaaaagaataaattgttgaatattatgaagaattatttgctagaagaatgcaagagaaaattcaactgtatagatgctaaagtagcacattatgtataaaatgtgactgaaataagaaacataattgaattaacatgaggacattaagtgataaaatgaatgtttttagtgactaagggtgagtagttggactattatagtgaaaatctccatcaaggcatctgagatatttaagacttaaatgtgactttgatgtagcctctggcaacatctgaggagtttcaagacaaaactgaatcatttacatggcatcttattactaaataagattgtttgattcaccatcaactaagattattattattttcttgaagcaagcaatccaccaggaattgtaatgtatctgttggattttaaaaggccattataattggtactattttaattgaagtacaaatttcaaagtcaatatatgtgtgagtacaaatgggtacatatacacatcaaccagatttttgctgtttgtgtcttcagctaatatcaagattagtggaaattgtaacaatgagcaaagcctagtatacgttacataagaattaagccaggatttataatatttataatactgtcagtaatttctggagttaatttaaatttaacatctcaagaatggcccagtatctttgtcgtgttagttggaaacatgaaaatatatgtgtttctagagctatttggctaacatttataatatgaatcccaagtttgggaaatctgttaatctagatttaaatatggaattctgttgtgaaatagactagagattctcaatagtttttggggagaaagggaggtacaactttctgaacagaattatctggtaggtgtggagggtttttaaaatacaagctctcctgcttttcccaaaaatgagggatggtgtaacatctttctcatcttgtggagaattggacataatctatcacttttttttttttttaattatactttaagttttaggatacatgtgtacaatgtgcaggttagttacatatgtatacatttgccatgttggtgtgctgaacccagtaactcgtcatttaacattaggtatatctccaaatgctatccctcccccctccccccacctcacaacaggccccggtgtgtgatgttccccttcctgagtctatcactttcttgatgggagtttgtaatatcttcagggttttggtaatcagtgaataagactgacacatttaaatcatcttttactataagtgcctatcacaggtcattaaatatagtagtcatacagtaattattacttgaatacatataaagctataagctaagcataaaacttgtaaaggattggtttaattcttctttgaggttagaaaacatacttgaaaagattcattggttcaatgaattaaggatggaaaaaaagtacatccatgccccagcatcatgctcagtcaactgtgattccattgtgctttctctctggtccagagagatacaaaacatctatgtgtttatgtataaatagagtcttccaacaattttttccatcaattccaaatctaaggaaataaaatggtgtctaaggaagagggaatgagacagggttccagtgatctcatgtgtgctgtaaacataaaatgctggaatgaatgtgtgaaaatttatatgaaattctgcagttagacataaaaacaacggggcttctttgagtgatagggttatatacttgacatgcaatggaacctgacttcaaggtacttggacagtattttcttagaatatattctgtcgtgacaaggaaagaaagaggaagaactggatgcatgattaaatactgctttatcattaaaagttagttctggaggatatactccatttggtaagtggaatatattcagtaaagctatagctggcaaaagtttcttcatgatagagattttctcttctcttgacttcctatgggattattatgacttactcccagtggttgggaacttaaaattgggtgtctgtctagatgagtaatattctgtttagtacatcagaacagtcttttaattacctccagtgaggatcacaaatggcttgtcaagcatataaaatcagataaaactgagcatccaactataggattttgagactgttcacatgttaccatcagttgccctttctgccgcccagctagcatctatgtgcacattggcttcctcccattgcaccaaaacccataccattcaatcagtttttcctggattgggctttttattcactacattgttacttccaaaattacaaatagtggtataagaattaaatggttttcttcacattattaattttaacttgccaacaggagaggtgggaatcttatatcattggagtgtattggtggttgggtgaattgagaagatgtggacggggtggaggatgtggtttcttaaattatttttaagccctgagtatgttggcatattaaagaattgtattcctcagactttctcctcctgacaatttgtttcatattgtgcttctgttctgaatacaagctccatacaatactgcacagtccagaatggtagccattagccctatgtggctctttaaattttaattagtaacatgaaataaaaatatgtttcctcagttgcactagcctcatttcaagtgcttattggccacatggggctagtggctactgtaataaacagtgcagatcgtagaacacttccattatcacagaaagttctactggacagaactgattgaatgtagtctcagatttccacgtgctttccctgtctacttccacttcttggccttccagtcctataatattctgcctgcatgattttttttttcaagagaaagagttgctgaatttaagggattttcattttttacgctactttgcatgttgtttgctgtcagtgctccttcttaataattatagtagtactcccttattctgaatatatattaaaacatttttcggtaggcctatgatgaagtgtactttcaccactcctctttggtggtgtggttcagtaccttggttttaattcatagaaacaccactgctgcacagtaaattacattgaaataagtgtggcatatcttgacataaatatcccacgaaaatgaggaaaaacaagtttgacactcaggtggctaatacatcactcagatattaggaaatggattgcactcttgttgacagaaagtaaggggatagaagatgatttcagtaatatgtaagtagggaaaagaacacagaaaaaaacagtcactattttgagctcattttgctgtttttaggggtgaaaatgtagaacatcagcaggtgaccattgtgtaagtgggttatcctttcccgttactcactggccagtgtgtcttatttctttctagaagtgttggtgttggcagtatttatctctgttcttctgtgaattctctcatttgcattgaatgtatttattaaatcatgcatgcttcaccgtgtcatttccctttcatacttcagttttgttttgcttttcccatcgatgcaggattataattcttagctctcaagtgcattcaatattcaatagagaagaatcactaaaaaatggtctttaaaaaaagtatcagaaattcctccttttcttgctgtagaacagcagagaaaatagcaaaaggtatagcaaaagatgagaagtgttatgggagggagaagaaaggtcaagaaagctatcaggactggctgcatttggaagtgaatgatggaattaagaaagcctattgactatggccaaacataatggggaaatcctaaagctgcttggtatcagtccatcaattcaaaaagcaatctgtatgtttgcctcttctttgcttttggacaaacaatggcggagcatcagggcagcctcccaggagaagtaatttctcaacagtttgttgtatgtgggatgccatcatagtttaatcatattgataccaaaactgtacaatggaatgcattgtgagacagtgattggcacctgcagtcacttagtattttgtcaagaatttgacatgccaatgaattgcgagagcaatgtatgcttgcttgaaattgatcatgaagcacctcatgttaagcatcttgatgttttcggctaatgtaggtcattgctgggctttatagctttcactcctgcttcagttttgttactaagggggaaatgatgatgggtgtgagctattgaaaacatttcacagcagactactactttttagaatggactccaaagtgaattggcacgctggcctccatttatttaatgacttcctccatgattatcaaaataaaatgagcctactatggagaattttaaaagtacagacaaatataaagatgaaaatagataattctatgaatcacagtagctactgtttagaatttggagctatttctatacagtttttcaaaattaagtatgctttggtaaactgatttttaaaaattactttgctagcgtgtctcatatcattaaatattttaaaacattttaagagtatacaatacatatatggatatactataatcctctatgattagatatttagatggtttcttatgtgtttgatattataaatatactcgtgatgcacatctttgcgtacattttgtatgaatgtttacattccttgagattgtgatatgagaatagaattgggatgaaggatgtacagctgaaggctgtatacgatctgatacgtatcgatagatagctttccagcaagtatgccatcgcatttccagcagtgtgtgaggatgacatcatttcgccacacctttgtcaacaccagtggaatttttaggacatttcttaatttgatagtaaaaattagtattccattgaaaatcacttaatattaaacaatttatttatttttatcacttatttcttttgccattcaatgggctctacctatttttctgttagaactttagtgattttaattaattgctgtgaactggttattaaggctgtaacatttttagccttagtactttgtacaattttacttctgctcctaatttttattttattttaatttgtataagctttttttttttttttttttttttactaaaatctgtcacctcttccttctgggattttttttcagtacttttacacttaaaaaggaatacttccctatccaaacaacacaagacatacactaacattttttagccttaactgctatagtgctgaagttatgttgacatctaataaatgtggttctgatgctagctcttagtacagtatgtggcatatagtgggttctaaaaggataactgaacatactgaatgatttcatgccctatactaggatccaggccatttttttctgtgccatatgtcagtgtttgtattcaaatcatactgctttaattgccatatttttataatatgttagtatctggtaagggaaaaaaaactttgtcctacttctcttttctaaattttccttgaaatcttgacatattggtttctccaagtaagcttttacatcttttgttaacttaaggaatatctatttgatctttttattggggaatagaaaggattattatttctgaagtattctatctttccattgaggaatatgacacatatctatatttgttcatgcattcctttttgtcctggagaaaaatttggcagttctcttgatttcaatagaaataccacttagcggtggctcacgcctgtaatcccaacacttgggaaggcccaggcaggtggatcacctgaggtcaggagttcaagaccagcctggccaacacggtgaaaccctatctctactaaaaaaatacaaaaaattaggtgggcatggtgacaggcacctgtaatcccagctactccagaggctcaggcaggagaatgacttgaacccgggaggaggaggttgcaatgagctgaggtcatgccattgcactccagcctgggcaacaagagcgaaactccatctaaaagaagaagaaagaaatacctcttaaatcttgtctcctttaagattataagataattatgctttttgccacttacagtttataaggttaaaaaaagttatcctggccggctgcggtggctcacgcctgtaatcacagcactttgggaggccaaggcgggtggatcacctgaggtcaggcgttcgagaccagcccgaccaatgtggtgaaaccccgtttctactaaaaatacaaaattagccaggcatggcagcgcatgcctgtaatcccagctacttgggaggctgaggcaggagaatcgcttggtcccgggaggcagaggttgaggtgagccgagattgcgccactgcactccagtctgggcaacaagaacgaaactctgtctcaaaaaaaaaaaagtatcctgttctcttagcttttcaatccttttcataaaacctattattgtttgcaattgaagtgaactgtataaaacgtaaaattaaccattttacagtgaacaatttagtggcattagtatactcacaatgttgtacaaatagcacctctatctagttctaaaacatgtttatcaccccaaaaatgaaacctcatacccattaagtatttacttcctatttcccctgccccacccactggcagccacaagtctgtgctctgtctctgtggatttacctattctggatgtttcctgtaaatggaatcatataatatgtggccttttgtgtctggtttctttcactgagcctaatgtttttgaggttcatccatattgtagcatgaatcagtacctcattcctttttatggttgaatagtattccattgtgtggatataatataactttattatctgttgctggatatttgagttgttttcctcttttgactattgtgaatggagctgcagtaaacatttgggcacatgtatttgtttgagtatctgttctcagttcttctaggtatatacctgagactggaattgccgggtcatgtggtcattccacatttaagtttttgaggaacagccaaactattttccacagtgatttaatcatcttacattcacactggaaattcagaattttctaatgtgcttgccaatacttatttttcatgtttttaacaaataaaaaaacttatagctatcctaatggatgtgaagtgggacctcattgtggttttgatttgtgcttccgtagtgaagaaggacgttgagcatcttttaagatgtgcttgttggacaaaacctattgttttgaaatcagttattgctactaaattatttttacaatttttaaattttgatatacttttgtaacgttttcatcagttgctgagacacttatgtcaacatttcaatctttcagtccttgcatactgcagcatctttataattctgatgtatttcccagttacctgaagtacatattcatgtgatgattattatttttttgagacagagtctccctctatcatccgggcaggagtgcagtggcatgctcatggctcactagagccttgaactcctgggatcaagcgatcctcctgcttcagcttcctgagtagttaggactacaaatgtgcaccaaaacacccagctaatttacccatttaattcatttaattaaatgaattttaaaaattcattttttaattttcattttttgtagagatggggagtcttgctgcattgcccaggctggtcttgaactcctggcctcaaatgatcctcctatcttggcctcccaaagtgctaggattataggtgtgagccaccacacctagccttcatgtgattttaaaaaggatttatgtgttagattttctgagtcctcgaatattttatctattattgttatcatacttgaattacaacttggtttgttacaaaattttcggcttatgaacattttcctcttagttaaatcattgaaaattttgttcctctttctctctcatgatatttaagttacaggggagatatttgatgccaaccagaattttgtttaagataagctggtttattctacagagaggtttgcagttcacccactaccccttgggccttgtattgaaaacctttacccagagtatgtatatatgaacgtgtatatgtatgaaaatttttcttttggcatttaggaatgtctttcttttccaatccctaataaaagtccaacaggatatttgttaagttgacaagagattacctggaagaagtgataggccggaatttcaaaggaaagttagaaagttacaaaatctgtctttgtatggatcatgatatgctcctttgatttgaaaccttttttctcctttgcaaattaaggttttgtttttaaatttctatagtgcttcttcagttttggccttgacttttgcttttatttcactttttatttttttccctcccgtcgtgataggtgtcactcaaatgatagatctactttctattcttcctaataatcctctcatcattttcagtaccttgtcttgtccttctgaggtctagaagaacagcacagtgttgttccccacattagtggtttaattttctgcactgcccatgataagttttgctatgtactgtgtcctttttgtttttcctattgcctattcgtttctttccttaccatgcctggctcttttcattcactcagttctttgtctttgcaactctcctaatgtgatttcacagactatcggaccaagaaatgtcagggccagggtataacccaagggtttccatggaactggaaatgtgacctcttgttgttttttaattattttcaaagaaaatatatactaaatatatgaaaaataacttaaagaagaatgaaagagtgtgcctgtgaaaatctatacttggctaccgagggctttactatgaatgtatcacaagtaaagagtcgcagatggtttacaatttcatgtagaagctgctatgtccttgttagagcattgcctaatatataaatatagattatgcctctcaaaaaataagatgaaataataagggaagatgggaaatttcactttttacctgttttttctatatttgtgactaatttctttgcttacatatgatgtgtatgagcatcccaaaacattgcacagataccacaatttggtagtttgtaagtaaagtgggggaagcatgagcttcagagtgttatccagacaagggtttgcgtaactgttctaccactttccacttgtgtaagctcgacccccttccctaagctctgagcctgagtgtcatactctgtacaaatccccatcttgaggaaactcttgagggttaaatgagatgacaatcccttaggcctaggatggcacttggcacgtgatagcactcaacaattatatttcttactcagtattcatttattgagtcctgtgaatcaggcatcatgctaggcgctggaggctcagttatgaataagacacaatccctgctctcaaggaactcagaatttaggaggacatgcagaagaggaaaacaacaacagtaatattctacaataaaagactgttctggagaggctgaagtggtttatcttattcacctttgcagtacagtgcctagcacagtttcagacacctaaacatgccttagctgtggtcaaattaatgatttactctctgaatgttgggatgcataaatggataatgtctaagatagaggtttaccgaagggcaggaggagtagagaagagggccatgactcgatcagggaagatttttaagtagaagttacacttcagctgaagttgtttccttccctgtttcctttgtaaattggattaaatttttgctgtaccaagggacttgatatttcaaggaaccttgctacatatcttttttgtaaagtgaaatcttttgtaatgcaaataatcacttcctaatttatatgtggagcaagttaagatttttgtatgtcaggttttttttttcttttcatttttaaagatgggcacaatggtctatctttgcaataagtaaacacaaccttacaataattgaatgagaaattattgattgaatttaatctgcatttttttcttccacatcctataaagaataaagaagctgttttaaatgtaaaaatgcccttgctgaagtgaataaagaagacatgtttgtgtagttctgattggaagttaaggcttttctttctcattagataatcaactgttctttacaggtcacttctttaagactccatttccccatatgcaaaatgtgggatttgaaaagtatttcttagttctgttgctgctctaaaattctctgaaaggaaaataaaatgattaatgacaaacttgctttataactataatagtaaaccacaaatagccaatatgctaggtgatagaaataaaaatgactcttatgtttagttaagatcaagaagtttggattagtgccgcacttggacacaggaaggggaacatcacacaccggggcctgttgtggggtcgggggagggatagcattaggagatagaccttatgtaaatgacgagttaatgggtgcagcacaccaacatggcacatgtatacatatgtaacaaacctgcacattgtgcacatgtaccctagaacttaaagtagaataaaaaatatatatatatatatatatatatacacacaaaaaagtttggattaaaaaaagtatgcacagtcatgtataatttagacttttagaagatgccaggcaattattagaagatgaaaattttatagccaataaaaactcattataaatacagtaagaaaattttcacttcagtattttcatattgaaagaaagcttttgtacatacacacattaaataaattccaattcaaacttgggccatggtataagaacatattcagttacaccaaatagcaagaagcagagtcttcaagaaaccaatagaatgtgaaacaaatgagggaaagttcaccttttattaatttcgtgcccttgctacctttcttctctgaaggatatttatagtaatataagtaaccatagggggcaattaatcctgagtgtgtggttaaattttgttccaatattaattgcttttagcaaaaatgaggctttattttaggcaaaattttaattttacatactgattttgggagattcatctattatctcatttctgttgcttagaaatgtactaaattaacccaaggaacaatgagtatataaaaatattacatcacatagtcattcatattatatatttattataagccaacattacaaactgttttgttgtatcagtaataccttagagatgccctgtccattatggtagggcttattgactgcttaatacgtagctagtcagagttgggatgtgctgtatagagatacacactggatttcaaagagtttttaaaaagaatgtaaaatgtctcctgaaaagttttgcattcttaattgtgatgacaatattttggacagattgtgctaagtaaaatatgtttttaaaattaagctcaactgaaaaaattttaaatgtggctgccagaaagttaaaaatcatttatgtgatttgcattatatttcttttcttttttaaaaaaaatttttttggagacgaggtctcactgtgtcactgaggctaggttatagtggcgtgatcaaagctccctgtaagcctccaattccaagactcgggcaatattcccacctcagcgtcccaagtagctaggaccactgatgcatgccaccacaccctgctaattttaattttttggttgagatggggtcttgccatgttgtccaggctggtctcaaactcctgggctcaagggatcctctcaccttggcctccccaagtgctaagatacagctaggataccccgcgagccaccgggcctggcctggccttgcatcgtatttctactggacagcactgccttagagttaaagaagcaagtcactttgtgagtactgatgtgttagttctgacacagtatataaatataccaatgattgatggttcattgatagctcttatctgagacatttgtgacatgaataacagacttttattactttactttttatccatcaatataggaataatccataaggtatgtaaaggaaagggctatactccaaatgatttgagaaaacttgatacgctttgtgcctcctcttgttattccgaagtgttcatcattcctgtgactgatttggaccaagatttataaatgcttttaaaatttcttgttcaaataagtttttcttcaataatatttaaaaacttctgtatcagtcaaggttgtgcttaatcacaccttctcatgactatcttcttaaatgcctacagccataaataaagtgtacttcatcagtacttttgatggtacatgacttgttttgctctgcagttgatatcacaatttgctttgtggtggtggtatttttcctttggtctaactttcctttaaaattgtgtatccagcttgcaaattggcttacttacttatgtatataagtgcttcctttagtagtgtcctaacatatagtgggtaccttgaaaaatatttattgaattaaaacagtaatgtagaaagcctttagatatttggttcttgaacttcaggactgcaaatatacctagaaaattcttacttcacctctttgcctgaactagatagaggaatcagcatttttttattattatactttaagttttaggatacatgggcagaatgtgcaggtttgttacataggtatacacatgccatggtggtgtgctgcacccattaacctgtcatctacattaggtatttccctaatgctatccctctcctagcccctcaccccctgacaggccccagtgtgtggtgttcccctccctgtgtccatgtgtgttttcattgttcaactcccatttatgagtgagaacatgcagtgtttggttttctgttcctgtgttagtttgctgagaatgatggtttccagcttcatccatgtccctgcaaaggacatgaactcatccttttttatggctgcatagtattccatggtgtacatgtgccacatcttctttacccagtctatcattatagctattcatgttatttatttttaaaatgtaacttacccctcaggcagaattttctctaaaaaagaattactgaattaagtgagcacctgctgaggtttaagagattaactgtctttcagcactcatccttcatcaaagttattttggctctgtgatgtcacatgtcagaatgaacctaaagactcaagcaaaccattgttgaaacgtgcatcagcaataaattggtaggttgcgctgcatttctttttgttttcaaattttaaaaattgtttttattatgaaataaactcaccaaatattgatcatctgggaaatattttgataattctactgctccaaatagtttcctttgcatttcagtgttctggtattgcctttgaataaataaattcaatacgtaaagttataaaattttgtttgctttaattctcaggtgctcttagtggttgttctcttgttctttaatcctccccatatttcttctgtattcagaaattatccccacttagcaataggtgaaatgatttctccgtaatcatgctgtgagtacagctaagccagaacttactactctgtctctgatctcatgagtttttctccaatttaacctaagagcagtctaagtgagaagtcagattatgaagtcattttgccacatcttcctgacagctgtttcttccctgagccaatttcattgctgggcttccactcacaaccagataggatttcactgttaaacatagcctctatatcctattgattgcggtaccacttcttgatttgtttttaaaaagctggatctaatacgatattccttgataggaacagaagattttttggaattaattatgttctttatttgttttcaaccattatacttaacaccgtgaatctctctgggagaagaaagaagaaagataactatttctttgcagtcaatgcaaaatgccattcagaggcataaccggcctctttgtcaagtttccttggagcatatccttgcagaaacaacagtttctacatgataggcatggggctgtgactgctcccacaaggaggccttctgaggcctcggttgctagttgagaaagtaacccaggagaactactggaggacaaacattcacagggtgcatgtgttattttaacgtaaataagtaagatcttcatgtggttaaatgtcaacgcacaaaagaacatgtagcctctcttctgccttggcctcctaccacttggttccctgttttggaatcaacgacttccgtcagtttgtataaaagagggtgatgagaatgtgcattttcttgtgtatgcctaaaatatgcacactgttttttaccttgcctttttaacctcatgatttattttgaaaattgtatcatgtgatgaatttatgttatatttatgggattacatatttcacagcattttatcattgaatccagttatttattctttttgctattacaaacaatgtcacaaataataactgaatacataattttatatgcatgggagcatatttagtagatcacattcctacaagtgtaggtgagaggatatgttcctttgaaatgtaagattatttaattttatacattgttctggaaagagactatataataaaaatatttaaaaataagtgaagaataaagttagtctctttctctctaagagaggcagctgctactagtactcctttggtacccttccagagactgagcgtatacaagcatgtgtggtgtgtattggatagatatattacgtatacatctttcactaggaagatttttattttttctccttcactctatagttctgattctcaaccaggagtgattttgcccctcctgaggacatttgtcaatatctggagacatttgtggttgtcaaaagtgtgtatatggggtcttctccttgtatctagtgggtagaggccagagatgctgctaaacatcctacagtgcgcaggaaagcccctgcaacaaaaattacctggccccaaatgtcagtagtaccaaggttgggcaactcgagtctataaggacttggaaggcttttccaaggtgttgatttcaatagatacaaagcttcatcagagccattggtgttgggagcatcattacttctcctcttcctcccttttctctttcttctcctgtttctatcaggaaccgtcattgctgtgtgtctcaccagcaagagtgatgttctaatgacattcattacacttagctggcctctgtaggatgactcagatatggtgtccatattgtcccatgtggttcccatttctttttttcttccctcactttgacagcgcacattctctggtagtttgctgggaaagggtatatgaaaagtagatttggaggggatttaatttctaaaaatgtctctattacatccttaagtgattgatgtttttatatggaattctagggaggaaataattttacctcggaatttgaggccgtttttccattttcatatagcatctggctttgttgttgagagagattgtgacattctgatgattgtttacatgtaagcttcttcctgggtgttctgaaatatcccactgatgcatgtaatgtggtgtgaatttactttcattcaatgtgttgggttcttggtggtctcttttaatctggaaatgtatccttcagttctggaaaatgttaagtaactttgttgccttttttcctgttgtgtgtccccattttggtgctctggtttcgatattggaattttttgatgattttcaaaaaatattttctcaatatatttcgcttggctgtccaggagattgcctcagatttttactctcttagactggttttctctcatttttgttgtttttagtttttaaaacctttttttgttctctgaattttctttttattctagctgttcctgtctgcagatgcagtttctgttctccctgatgattaataataggaacatgcttgttttttacttttcttcttattgcttagtctttttcttgcaagttaccattttctactttttttttcatctgagtcgtatcttctgtgttagagagtttttcagctgtcttgtaatctttgattgtctatttatggttaagtggtttggaagttctgagtgcatgaactgggcttgttgaaattcattactgagtggtctgggtgaaccatgtagggaactccaatgtctgttatctttaaatttgtcctcttgggctgattagcttccccaaagaaggaacttccaatttctcatttggagagcttcaggtgttctgggagccctgtgggggaaagagtgggttctcagagtgcatatgatcacttaatcttcccgtttggggtccataaccattcttggcatcccttagtccagagagctcctgtttaatgatctccagagaataaacctccagacctcccaccctcatttctacagaggtggtctcagcagctgagaccagacatctaattgcatctcaaagagctttcatacaatcgtctttattttagccgtgttatttccaacagaaccatcctttctctcagttccatgggtgactggtactccgagtcctaaaccatttgtgtcttctgtggtgttttggactctttctcagcattgcatactgttggcttggggtctcttgtttcattgctgctaaataaattgctgttaatccatctgtttactaccacaaaaagtttcatggctgatatctcttcccctgttttcccagttcttacgggtttatgtcttacatgtaatttctcctgtaattttaatgtggtatcagaagggagcattcagtgtgggtccaggctgccatcccaatttagaactctttgttgtacaaatatttagagatctctttatggaaaaatataggtagaattggccttctctctcctcttttttgctgctactatgtcctaatttggattaccattttggctcctggagcctgggcagttagctgccagagctgtttctaaagcaaaatcaagtccccaattcactatattgacagctatgctgatggatgtggcactaccgctggtttaagattagttggcccttcatgagtttgttgttgctttatgcttctgactataccttcccttaactcacctttgatcctaaggaatgtgtgcataatctttttgaaaatgtttgctatgccaatattccagattaatgtctaagaatgtttaatggtcggaagctgcgctttgagccccatcgaccaggtgtctcctgcttcgtggtttataggtcacctttgcacagggacaaatgcttcccgacttctttttacgactcagaggatgctgtatttgtaaagccactttcattcactgatcgtgaagccttttacagatttaaaatcattcatcttttcaagatgctaaggatgttggtcccatgtagagataataaatactgggaaaaaatacataatatgcaatgacagcagtcctttctgttccccttagaaaaggattccaggccactggcttcttattctgcttcctaacaaacaaatatgacaattagttacatgaaagatgttgacaaaatagttgttttgtactatgtttgaaatgattttgatattgttattttaatgaaaacaattctaggacctgcctctaaggtgccatttgaggcttctacccagagttttctacctagagttttacttttccatgcagttgatttgcgtttttggtaaagatttccatgtttctataaatatttatggacactgcaatttgagtttcttagagttttcacatcacaagtattattattaattttttttcagccatctaaaagtataaaaatattttaaactcacagactaaacaaaaactggtgctaggccagatactgcctgcagggcatagtttgctgatcttggtttaaaacttttgccttgggatgagtgctgttcctcttgtgccaagtgtcagctgtgataatctgacatctgtaggtgggaagacattgtttgaaattgggatggctttgctcaagcttttgtgttgatgggagaattatttagagccagttcagacaactctcatgtattccatttgtcaacttctttctctcctttgtaaccatttccattcttcttgtgggcattattttagttttctcctgggtattttcaaataatttgaggatttttgggggtgaggaggaactgggtatctctctgttcccaggctggagtacaatgacacaatcatagttcactgcagcttcgaattcctgggctcaagaggtcttcctgcctcagtttcctgagtagtcaaggttacaggcatgagccactatgcttggctttctttattccgagtagagattatatacaatgcactgtgctagttgcttaagagatatgaatataaaccagagccaagtttccttagcagataaacacagctatggaagaggtttcttccctttgccaaagttcaccgagctaatcctaggtagggagtgtggtctgcaggtgtgtgtgtcagcagaaattgtgtaggtatcttccctctgtcttcatgttgtagatgaggcatatttttctgtattgattcccattttggggatgccagcaacatcaaaatagtgaataatagtgctatgctctgcatttttaaatattaccatatttttactactctaaagagactactctctcttcagatgccctctgtcaatttattcattaatttaaacttgttttaaaaacttactttgaaagctgtattgcttggcaaagatagatcaccacttagtgaagatttgtgattgaatgaacaaagaccaagggggaggcctaggtgatgaagtctatgcactgaaaataataaaaataggaacttttcaaaatgaaggaaatcagtataagggtgtagaatcaaaaaacaacacaattatagatttcatggtagttatagtaagtaatatagtctcaaatgaatactcctttatttcatagcagggattggcatttgtgcaatattctttagttaaatttcaatttattggatttttgcatcactgcagattgatctattgaatttgtcacagtggccttgtttttaccttgatgtgtttaatacctgctggatcagaatgccaatcaatttaggttaatttcattaagtttgctaaagctttttaaattaaaggctgctgacattaccagtaacaaaatgtaagtaacatattctcacatgttattgttctagacaatagattggtgctacatattctcttcgaacacctccttacttggatttttaaattcccttaattatttacaagaatataaatcatttaacattttaaattttaattatctgcatgatcattgcttagtattctgtgccaaactttaaactcagcatagatttcagctctcactaaatagatttcaattaaattccttccatgttttctagaaagaaatggattatatttttaaaaattgtattgtgctttccattacaaatataaactggggagtggttcctgagaagtggccttttaattcttctcttttgcattttagttctcagagaagtcacagtgcacttagcatttaggtgaaatataattatcgttaaggtttttgtgaataatatatttcgcaatgagctcagtaatatgcagttatggaactcagcttgcattattaactgattttattaactgccattaatgcagtatttataaatattgcttggagaactgtagttacatttaccaaagatagaatcaagaggaactctaaaaaaagaagagcagactacatcatttccaaaaccactagtgaatttagaaaggggaaaaagaatatagcactcaaaccatcaaaaatttgctattcaatcacattttaatgctttatggcattggtatgtagtccttactgcacttttctatggggaaattgagcaaacaaaagtttgttatagcatatgctgatctagaattaaagagattttagttacataaggttcaaattatctttgacatattttgcaggttacttacaaaatcctgcctaaacacagaactcttctttatcagagaacctaacatcagattttaatcatatcttgtacccacagggttttaggtttccaacaggccacctgtctcggacatttaaaaattcacaggacagatgggaaggtgaaagaacctgtccttggatgaagaaatttttacattgcaggaatgttcacaggcagggccagccaatatatcacacacataccttgtatttgtctagtggtgaggtataatcacacatttccctttagtagtataaatacagaattcattatttatatgcattctttttgtggtcaagaaagagaaaaaaaattagagcttgtaaaaacctgtggttcaggtgatccatgattcaggaaataagactatattttatattaactttccagaatctctgttcatggaatatgtaccttatgtaagaccgggtacaattgtgtttattaacaagtcaggatctggagctaggtcgcctgggtttggatgtcttcctgaccacttacaagtgaccttggcaagctacttagtatccctgggcttcagtcatctcatctgtgagatggggatgtcaatagtccttcatgtggtttttgtgaagattacacgaagatgacatgaagataacactagtgcctagaatagtgtctggaactgggagttagtgtttggtaaatgttggctggtaataatgatactaattgcatgtaaaaagtaaaagaggcacttaaagcttagacttggaaattttaatggaaatttaaggaaaaaaatgttctttaaaatttcacagttacatttatttttgggaaggaatctatctgttacttgtattcaaaatcgttgagcagtggtagtccgttagaaagcaccagcggattgtaccgcgaactgtggttgatctttgttaactccttacactggtattacttggaaacatgttagaaagttgaatttttaggcccagcctgggaactactaaattggaagcttcaggtgggactgagaaatctgtgttttaacaggccccccacatgattttgatacatgctgaggtgtgaggaccactggtttagatgcgtatgtatttattggaagacactatatttggtctgggtactagctagagaatcagaacatgagcgattatgtcccttttctaatggacattccagtggggtggggcagacaagaaatttgtaaacagtcataaaaacctaagaactaaaggtggcagaagtattaaaaaacaaaagggaacagggaaatggtgtaggcacaataattgggagttctaaggtactgcagagagagggtgttcatggaagggctgaagataagacagcagaggttaaattatgagaacagtacataacaaaagtcagtgaaagaacagtcccagaagaggaaacagctagtgcaaaggccacgagatgggggtgctttaaagaggggccctgttacttgtctactggtaattactattggtaaactgaaagcatgttattcatgtcggggatttgattattgtagttagggaaaggggttcttagctaaggttttgatagactcttttacaaaattactggccgggcgcagtggctaatgcctgtaatcccagcactttgagaggctaaggtgggtagatcacctgaagtcaggagttcgagaccagcctggccaatgtggtgaaacactgcctctaccaaaaatacaaaaattacctgggcatggtggcgcatgcctgtaatcccaactactcagagaccgaggcaggggaattgcttggatctgggaggcggaaattgcaatgagcctagatcacaccactgcactccagcctgggcaacaggagagagactccatctcaaaaaaaataaataaataaaattaaattaaaaaccaaaatattactgtaattccccattttatttttcatgtagacccactacctaaagctaactgtcatacactatcaatttgtttatgagttgatgcaccagaattgctttgtgagctctgaagtttgcattgggttaacagtaagtcgtgaggcatcttgtaatttgggggctgtggttaccaatgaacctacaacccccaaggtaaaacgttttcttgtagaattatgggaatcttgtcaacttcagatttcttttgtccaaaacttaaatcactgtccttagatgtttttatattgtcgcccacatgtgtaaatttgtgtgcagaatagctaattatagtattaattataatgagcttttttttttttttttttgagatggagtcttgctctgtcgcccaggctggagtgcagtggcgcaatcttggctcaccgcaaactccgcctcccggattcacaccattctcctgcctcagcctcctgagtagctgggactacaggcgcccaccaccatgcccggcttattttttgtattttgagtagagacggggtttcaccgtgttagccaggatggtctcaatgtcctgacctcgtgatccacctgcctcggcctcccaaagtgctgggattataggcgtgagccactgcgtctggcctgtaacaagcttttactagtttactattacctataacacccgtaagaaaaattttttacatatagaataaagactgtgctggcttatgattttaactgcaagagacaagtttttctaaattaagactaaactcaacaaatttaaattttttaaaaatgaaattatttcaatattttgcatattataaaagcattgtagctagctagtttaactcacattatgacaaatttaaggataacatatcttacatataaaactttcttttttcaatctttgcaggataaaaatgtcatgtatgagacataagagtacatctttttaaatataagaaaacctagatacaaatccaggcttctccacttattcttaagtgatgccatgatcaagtcaattatattttctctgttttaatttcattgtcttcaacatggtaatataaaatctatctttttgggtttattaactcagttttgagatattaagaccatatatccaagtgtatagcaaataagtggtccaaaagtggtgatttttatttcacatttagtgaaaaaactctgaattaatagtttgattaactgtgccaaagaaaagtctgtggctctgggaaggggaacatcacacaccggggcctgttgtggggtggggggaggggggagggatagcattaggagatatacctaatgtaaatgacgagttaatgggtgcagcacaccaacatggcacatgtatacatatgtaacaaacctgcacgttgtgcacatgtaccctaaaacttaaagtataattaaaaaaaaaaaaagaaaagtctgtggttctgtccatctttcaagtatagattctggttatttctaaaggttatgattctgtttttatttatttactttttttttgttttaagtcacagaactgcaggaacttgggtgaagtcagcgctcagttttgattttatctttgaagttccgccatgtggccagtggctagcaagcattctccctttggggcatttcatttccaaatgaaaaactctgagtttctccaactgatgtgtttcattcactcactgtcttactggtcttcattgtagcacatattggagaaatatggtactgagcatactttggacagcttcaaagttgagttaaatgtaagtattttccaaacagtggaggacaatgaaagataacagatactttagtatgcgttcatgtactggctggaacatgttcatgctctggcagtgactttagcttttccttagaaagcatggggatattaagttatttaaaagtattctttagatctaaagtctaaaggcatctacccagattaattttttaatattttctgtatagtttcctgatggtattagaagcaggaagtagtatggagataaggagcatatttattgaatgcctactatgtgccaagcactttgcttaacattatgattaatttttgacttctcaaaaccttgtgatttagttagtacctatccattttatagatgtagagagcaagaatcattgatactaattaacttgcccagctttatgcagttagtgaaaagaagttaaaacccaggtatgttggatcccaaggcccaagttcttgaccactgtcttctaatcaacaaaagctatatacttaagaaaacaagggtgaagaatgaggatactaatacattggtatcactgtacttgacattgtggtttatgtttcaaatactggttctgtagtcttaaaggagtatatttatttgcaaatgaaagtagcaagctcacgatggcttcctccatggtttaagaggataatgagagagatcaatagttgttgtcttgtagccaagcggtacaggggagaactggaaaggtaggttcccatttgctctgtcctggaggagatagtcaatgagagtatagccaagtaaaattattacaaatgttcataagtactttgaaggaaacaagtaggggttgaggtagagaccagcaggataaggaatgttgcatacataagacgtgggaaataggaatggctcatgtgaggaagtgacataggacctgagccatgaaggctgaggagccaggtcttagagctgagtgctgctgtcagttatcagaggagccctgaataggccatactcctccagggatggggcatagagtcctaggcttcttcattcctggcagagagtaggcaccatgccgggcacatggctggccctgatgtatatttgctgaatgaattttgcaaatccctgcaaagagcatttccttatgtacctgcttatacggtcatctgtgttgatgtagtgcagccaggtacttgtctacttaaacttttcattacagaaatttttaaacacaaaacagagtctagaataatgaatctccatgcatccatatctacattcaacaattattaatattttttcaatcttattttatctaacctctacttcatttttttctccctatggtattttccagcaagtcccaggcatcatatctttacaattgtaaatactttaatatgcgtttcacactgatgagggcatttttatttacatagcctcaggtcactatcacacttagaattaataaggactaatcttctgatcttttaaaaatttaataaagctaaatacaatttattaacaaattatgatggaattagcatctataaatgtgcctggatgcagttgctatttccttttaaattcttctcatgtttgtgacttgactgtccaatgactgtaatttcttactctctctccaaagctagcaaccaaacatcaacttttcgttaaaaacaagcaaaaaaaaaagtggcccaagaggagcgtctacactgcaactgacttagaaagctgcttgacagaacctcctctctttattggtccctgtggtggcagatggtattaaatctgtacatgtgtcagaaacattatttttcaaaagtttgctctgatatttttcctccagacatcatcggatgttggttctgtcttcataaattgcaagtggaattgagcatcggtagactttggacaatcttctgtcactcagaactggctgctatgtactcaacactgggaatctagaaaaatacagatctttgaaatcattactgctgacaaagaaaaaggaagtcccagtgacacctcttaacatcatgacaacctgactcaccgaccactttcactttttcaaaaaaccgtgcagtgttagtttggctttaacatctctgtacccctcattcattatttaatcttattttgctttgttcagacaagctatctgggctattgtgaagcttcacacagccaattacctcaaggtgtttagttcatttattatttaaagcataaatcttgtacaggttgtccattgacgaccctctgagtagatggagtaaatgcctttcatcctggcggcctcagtcagtgctcacagacctgcttgctgagcttggcaggccaggcgagagctggagcatgtaagatagcagaggtaattgcactttactttctgtttaagggtacatgcgaaaaatgtgcacacagtcgcaaattgagttgatatgtagagagaaagaatctttcatttaaaatgcagtatttctttctacaaaatacttgctggacaagttaaatcttgttaaacgttttagctattgatatgggctggatactgaatttaaaagtttgtttagagtaggccatagtaacatcacacttaagaatacttaagcagaagtgttttgttgttttttttttttttttttttcaaatttgcatctgtgtccttgaacccattttcctttccatcttgcttttagtcttgtgtcattataccaagggtcagatgacttggaaaaaaggctagtttaagtaatgtgccaattctgctgatgggcttacacgccattaagagattttattccaggccgaatgtgccaggtatttaactgggaactggtactaatttcagagctaatactgagctgttccacatcagtgctttcagcaggtggcttgaactgacagtgtaaagaaaaaagtgagagaaaattaccattgtactttaaatttctctgattgaattgactgattatactgtcagaggagcattgggaagctggcagggttatgggcagtgaagaaatgacagacttcttttagaaagagcttgcctgttggtttttgcacggccaaatatttcaaaatgataataaggtttgatgtgagattttaattcagtacttgtgaaaattcatgtgttctctgatatgtcttttaaagcagacaatcttgtaaggagagccagtggtttccctatcaccattttctcttatacagcaaagtattgaaacattggattcaaattccatcagtcaatgttaaactacattattttatatttacaaagaagtttcataaagatttcaattttgtgaagaagcttcacttatcagagaatggaattgagaacttaagtgtctcaggatgaaaaactgtttgttttatgtaatcggtcttatatcatgttcttaaataagatcttctgtgtaagaagttcttaccagtcacaaatattcccagttgtcttctaaatttatgattatttgttctaaaattctatattatttaaatattttaaaatcttcttcaaatgaacaacttaaaaaaaaaccacagagatacattattctagttactgttagtggaataataataatggcaactagtgtttattgaatagttgccacataccagatactttactaagtgcttcatggtgtcccatttaatcttcacagtgactacataagtaaatttctttcgtattcctgttactgatgaggaaatcatggcccagcgaagttggataactttcctgggtacccagagctagtaagaggcagagccagggtgctgactctcagaaccccattgcttctcctgtgtcagcacaggtgactctttttttttttttttcctgtcaattcactgacttccttctgtactggtgagacagggaattaatacaataatttcccttttcatggttatcccattatgaatttaataggactttttggtatagagttatgagaattcataagggaatcatttaaaatgcagaaaaatgtactgaagtgttctatgaaaggtgtaagagagacaagtttagcagagtgtaagtcaggtttggggcagaaggaaaaatcagtcaggataaatgggtcagcattcatcatttgttcaacaaatacttattgtactaggtgccaggcattggactcggcctgtcggaaagcactgggtgatttatttttgttgggttgactccctggtgggattattcacaaacaacctttcgatgtaagtaggaagctttaattgcagaagagaagggttaaagtctctctggttggactatggtgtgtgagttttgtttcattgcataatctagtaggctatcctcgtattatcattattctgatgcagtgtaacaaaccagcaggaaactgcattccatgggatttctatggggactacagagaattcgttccaatgcttacagagcagcctgcttggagcttaaagtagcctcagggctaatgtgaggagctgtgcagctctactactgaactgtaaaactcaaagcatgcgtagtgtaaataaaacaaggttagtagaatcatttctaatctggaggccttatcagagcgttggctgataatttattgttgaaagaaggaaaaaggcaggagatttgaaatactatgcctcactgaaaatgtaaatacctgtttttttgcttagtttaaaacttacttcctctctttttttttttaagcttaattgaaggtacattttgaaagaatgtgcaccatttaccccacttcctccttcccccaaacaaaactgtcaagcacagtgacactttctgtagcaaacttattcagcctaggcttataggaatccatattcgggggcatgttggtttgatttctgtgttctgtccacattctgtgagtactttgtgtccccccatccccaaagtgtgtttagcagtgctcccttatgttaatagaagaattgtcctgccttctttagccacgctcacatattggatggttaaagttgctaggtaccagccccatgaggatagtctgtggtctccccaccatgcctccccatgtgcttccactactgtcggtgctgtgctgttgataagctgtcagaccggcctcataggcctgcgacctgtgactcacagaagcctccccctcacccctcggttcaatttgctgctgtcatcttcttgaaatccttaataatgtttaatcaaggggcttcaccttttcatttggcactgggctttactcctcacatagctggtcttacctgttctgtgggcatcttccccgttcctgaccccagcagcagagattgcatccttctgccaactcagatggtgcctcatccatgaagccttctagtttttccataaacataagtatctcttccctttgtatgtccctcagttacagcctgcattccaccctgccttgaattcacatctgtcttgcatgcacatctgtctccctcagtaagaggtagactcttggagggagggcaggcactctccaaggatctttgtatttttttccctccatatcctagcccaatgcctttcagttctccataaatgctttctgaattgaagtgaattaaataatttgcccttttatctgaaagagtaaagaaatttacatttaatataaggcccctttgatagacatattgccttcatttcagttctcttctgatgcagaattatggtgctggcttccattgaatggcaaatgggatgagatggtacacatacgattctgcctcactgatgaatttggggtggaaaaaatataaatgaaatcatttcactaattttaagacatttaaagagtatggaaattgagcttaggaggaaaaggttaactaaggttaaagcgaatgcttttcatttcacttagtatatcactaagtggagatttaaaggcactgctcttttcttaccaaactttcctatattgctcctggatttccttttaatgtaatttaagtaagacattctcatggtttagatcattttaattctgcatgcttcacaagggctattttcatattggaaatatttcataatatgattccttgagcctcttagaagaatagaatttacaacgcttggtatctacacaggaggtagaattctagcaggtttagaaacttgtatataaagttcagactttgtttattagcaacaaaagacaatgcagttgactctaccacacagatttttagcagaggggccgtgatcagcttcaggagttctataaactctctcaaagtgtatgcaaaaatttattttgaggacattcaaatctcctagagagagggctcccagggcaatttctcaaagtattcaagccaagttaagaaccagtgggctagcaaaaatggaaaatggaatgaatacacacacgcacaaacagacacacacatacacacacacacgcacgtatattgtaaagataaattaacaaatcaatctgctgaagaccaaatcctgtgttacatgcatttgtgctgttgaaatctgaaatgtgtggactacaaaatgttgtattcattgagtattacactattatttttctgaaaatagaagataatactaattttgataaatatagatttatgtatttataaatgagatctcaggtccagaatttgttcattcttgaatgcacatttgtgagcaatatgttaagaaacagaggaattgggcaaaacacaattccttcaccatgccacataataataagagataccgttgctaactgttacattgggaggaaaaacccaacttccagacatggttattctagaatatgggaagtttacgatgatatttgcagcatacccatgtaaggaatgacatactttacaataacgaaaatccttgcttagaagtgaatgaggcagctttaggaaaattccatgccctgggagatgcgatcgcctaaataagtctcacacacagcttctgaatttcttgtgcatctctcaaaagtgggttggacagccttccctagtttttgtggcttgttttttcatttagcattcttttccttatgtgttactttcttgactgatttccgggctctctgagcatttgggagcagcgtagctacggaagagcccaagattgcatacggaaactcagcttggactcacaggctgaggtgctcacctggagcacatttgcctctaaaatatgcaaacattaaagttggggtaaactctgagaaatcctgggatagttgcagttctctttagtatagtttagagacagcttactgtgtgtagaacagctgtaagcactaaaggggattcgaaggcaaacaagactctcccttgccttgaggagcagagaaggtcacaaggaaaacaaagacaccagacatctgaccccatcagacatcctcagatggaacaattcaaccaaagctgtgagaagcatatcattccaaagacaggggcctgtctgaggaggtaatttgtaatttttaaaaaagcttttgagcttacttggagacatttccgagttggagccccaagcccctaaagatcttgtgtgatagctctcaaagctgactgcccctcatttccttctttgctatccctgtagttggtgtagagttccctagtgggactcagaaggcaccaaggatgcttcccgactgcattttcctctcctgattccttcatttcagtctctactagcttcctttttcccgcttcacacctatgtcctcttcccctcttcccctcttccttctgccattcacgttggccttcctcctgttctgtcccaaccatgatttttctgtaacctttaactccaaggcaggctcaagctctaagaaagtaaaaaatgagtctttctcaaagaggattttggtaaattcttggcttttccactgtgctatgagttgaagatacattgtaatatgagaagtttttcttaaaagatgaattcgtttttcaaaattgtgctttcagaaaagtgaagtataataatacttgtaatctacagtagaacacttcataagagcatgttgggagttttgtagccctctggtggagtggcataagaatccataatggaaatattgatgacctggattttcactgttttcaagatggcaaaatgatagcttttccttttttctaaatactcttttatttgagggccacattttgttcactgccatgtggctgagtatctcatcatttatttttaatacttaaatttttttcttttttgtgaactactgtttcaatccaaatttcagagtgggccgggcacgatggctcatgcctgtaatcccagcactttgggaggccaaggcagatggatcacttgaggtcaggagttggagaccagcctggccagcatggcaaaaccccctctctactaaaaatatgaaaattagctgggagtggtggtgggcacctgtagtcccagctacttgggaggctgagacaagagaattacttgaacccaggaggcggaggttgcagtgagccgagatcatgccactgtactccagcctgggtgacagagcaagactctgtctcaacaaaaaacaaacacaaatttgagagtgaataaagtgtatagtattttaaaatctttaccaatgcatttcatttttgttaggattttattacatgattaatcacagaaatttaaaattgaggggattgtaaataagaaattggcgggctatgagtacagaaaggctgccaggttttcaaaatgctgttttgcttctgtgttatgcaaatgaatagtcataagcttttgtatgaaagcagtttaacatggagaaaatagtattgaattgaaatcagacctaagttttagtctgagttatgagaccttgtcggtacctgattctcgaaaggtcacagcagcttatctggaaaacttttctttacatcagtgaaaagtgacctagtacataacttctgatacatcttgtagttttgtggtttggggattttgacatcgttacaaaaattggaaagtcatgctttatggaatctttgctgggcagagggggtgtacattatgataatttcttaaatgtgagtagatgaattaaaacacaaaactatctctatactgagagttacaggcataccttagagataatgcaggttcagttccagactactacaataaaacgaatatcacaatgaagcgagtcatatttttggtttccaagtgcatataaaagttatattaacattatgctgtagtctaagggtgcaatagccttatgtctataaaaaagcgtatgtcttaattaaaaatactttatttctaaaaacatgtgaacaatcatctgaactttcagggaaccataatcttttggctggtagagggtcttgccttcatgttggtggctgctggctgatcatgtggtggttgctgaagtttggggtagctgtggcaatttcttaaaacaagacaatgatgaagtgttccccattgattgatttgacctttcattaaagatttctctagcatgtgatgccatgtgatagcattttatccacagtaaaacttctatcaaaattgtaggcaatcctctcaaatcctgctgctgctttattaattaagtttgttatttgttgtcacttcaacaatgttcacaacatcttcaccaggagtaaattccatctcaagaaacaagtttctttgctcatccataagaagccactcctcatctgtttaagtgtgatcgtgagattacagtagttcagtcacattttcagactctacttctaacttgagttcatttccatacatctgcaatgactaccttcactggagttttgaacctttcaaagtcatctatgagggttggaatcaacttcttcccatcttctgttaatgttgatattttcaccttctcccatgaatcaaacatgttcttaacaacatccaaaatggtgaatcctttccagaaggttttcaactgactttgcccagatccattagaggaatcactacctacggcagtgacagtcttatgaaatgcattttttaagtagtaagacttgaaagtcaaaatgactccttgacctgcagaatggatgctgtgttagcaggcatgaatacagtgttaatctccttgtacatctccatcagagctcttgggtgaccgagtgcattgtcaacgagcaataatattctgaaaggaatctttttttctgagtagtacatcttcactgtgagcttaacatattcaataaaccatggtgtaaacattgtaccatcatccagccttcgtcgttccattccttgagcacaggccgagtagttctaccactattcttaatggccctaggattttcagaatgataaatgagagttggcttccacttaaagttaccagctgctttagcttctaataagaatatcagcctgtcccacagcttctccatcagcacttgctgcttcaccctacacttttatgttatggcatctttccctaaaccacataaaccaacctctgctagcttgcaacttttcttctgcagcttcctcacctctgtcagccttcatagaactgaacagagttagggccttgctctggattaggttttggcttacgggaatgttgtggctggtttcatcttctgtcactaaaactttctccctgtcagcaataagcctcttttcactttcgtattatttgtgtgttcactgactggagtagtggttttaatttcttaaaagaacttttcctttgcactcacaatgtggctaacttcttggtgcaagtgacctagcttttggcctatcttgcttttcgacgtgcctttctcactaagcttcatcgtttctagcttttgatttaaagtgagagatgggtgactcttcctttcacttgaatgcctagaagccattgcaggggtactaattggcctagttttaatatttttatgtctcatagaatagggaatcctgaggagagggagagatgagagagaagagccagtcagtggagcagtcagaacacacacaattattaagtgtgccatcgtatataagcatgatttgtgtacccccaaacaaatgtaacagtgacatcaaagatcactgatcacccaccacataacagatataataataatgaaaaagtttgaaaggtggaatgaattaccaaaatgtgacacaaagacatgagtgagcacacgctgttggaaagatggcaccgacagacttactcgatgtaaggttgccacaaaccttccatttgtaaaaagcacagtatatgtggtgcacagtgaagcgaaatgcagtaagacgaagtatgcctgtacttgagagtagagtctgctcatttttgtattcctagcctgctgcaactcttgacatgtagcaaacattcaaaagctgttgactgaatgaaaaacagtttctgagattgcatataaaaattaaaaattggccagacccggtggctcaggcctgaaatctcagcattttgggaggccaaggcaggcagatcacttgagcttaggaattcgaggctatcctgggcaacatggtgaaaacccatctctacaaaaaataaaaaaattagccgggtgtggtggtccatgcctgcaatcccagctacttggggggctgaggcagaagaatagcttgaaccttggaggcggaggttacgctgaactgagatcatgccacagcactccaactccaacctgggtgacagccagacccagccttaaaaaaaaaaaaaattaaaaattgcattcagagtagatttgttaaatgaagttcatcttatatcaaaaattgtctacttaataaacttatatctgattttgttagcatagaccacttgcctaataggtcttggtaatagtttaggttacatgtgattactaaatttctgaaaaaggaggttattattaatcatgtaattttagtgagagaaaaactttattttcctaacagataggaacatattgttctaatcaatatgagaagttttaatgtttcagaattgcttgtttttgattttctataacttgaacaaaaaattgaggaaaagagattagcctaataactcctgccttatatgttgctgtaatttcaaatgtgtatgaaactatttaaaaatatttcaaatatctttggacttggaaatcattaggttgcattttatttttttctcttgaaaaattactgcaaaactaggttgtagcaagctaagtttcatcattattgtctagcaagctttatgtgccaagttatgaactcccagatattagagtttaaaatagcagtgatgccactataatattaatgataaatgtatgccatatgtttgaaacatttaaaaatgatcatagccttaaagccaaaaggagctggaaaatatcaatggtataggaactgtcctatttggttctgaattatatatagcagagagagatagagataaattgcataataaatcaaagttcacatggtatattgtttattttttaaaaaaaactacaaaaactttctgtttatgcaacatgtcagctatttgaaaaaaagatgaatagtttctgattcaggtttgtttcaagaatgaatatttagcacccaatggtatcatactgaatgtaggaaaataattacagtgtatgtttaaccaggaagaattctaggaaagcattgactttttatactttgaatgtgcttttattctctgatgaatttgtaccttttgtgtctttttgatttataaaagtcagatgttttaacctccctttcaaaaactgtagcagcaatatcattcagtagtgtatgtaagattatattaagtcaataattaacaggaaatgtttcttcctggtaattctgttgtattaaaacatgatgattgtcagagaattacaaacattgggaaatgctttttgatgaatggacagaaattagttacagaatccactggtaaccagaacaaaaaaacagacagactttcctaatattttaatattcgaagcaagttcctatgtgaggaggtttcagaggtttgcatattttttgcagacatgatttactatagaaatagtgtgttatgctctctttaaaattttacaactaattgatttaattaatagtctataagccctggagtactctgtcctcattttggacagtagtctcttcctttgcctttgaggtgcagatgccgtttagccatctatgacttatcctatacactgcacatcagcatgcccctaaccaaaagaatcacaggactactgaactgcttatacaggtttctaatacagaacttgaaaagctgcagtatctcacattacaggtggaagagccttggtacggttatcactgtggtagctatttacttctaatgtgagatgcatgtgtgccaaataacttattcctggaatgattttgaaaatagtaccatagattattcatgaatgcattcattcattaattcaacaacatttattgcaaaataactcccaaggagctaagtaaatgtttgtgtctgttgtgcctcattttaacatgtgggtccagttagtcccctgcttctgctaacgtcctgacgttttcactcacggtcttgtctagtgggctccatcaactcatttgttgcttacctggtccaggagtctattaatctccacacctgatctttagagataagtcagaggctaaatggagattcttgaaatgagataaggaaatgattaaaacttaaagagaataggagcaaggaagaaattttaggatggagtggagatgaagagggccttagggacagctggaagagccagatgggaggatggagagctagcagcgatggcgggatttgaagtggtgtgtcagggattccatggagagaatatgcaagggaaacatatggaatatcatggtcataaccattcaccagactcgttggtttcttcactggtccatttcatgtgactcgtaggttgatatgaaaaaggaaacaaacattgaggaaaagcatggtatctttgcagatattttagtattgtagatatgtcctaagaatactgtattttttttctctgatacttacgcaaagatttttttatatccaggaaccaatgaaaaactgtaattcagttgatgtgtttgaaaaatattgattgacataatttaaaatgtagatggtaaaggcaaaatacttgtataaggttataccaaaaatgtttttgacaaagtttttgttgtacttttctagaatttgaagggttttcataaagtgaaatacctattctgtggatttttagaacgggcagagttgctattctgtcctttcctgaaaatgttaccattaaaaaaatttgtacaaaattattctccatttcctcaatgttatattgaccaaataaaaactgaaatttgtgcagagaatttttttaggaagcatacctacttgtttcaaaaggaaacaaaataaaatggaagcggtgtttaaatgatttttattcatagtgttaaaatggttataggaaaaattcacatttttccttaacacattgtaacaagcaattaactttttggcatagtgataaatctgcttctctaagaaggtgttttgtgttttaataagtggcaatacatgctggtatgttcatttttattgaatagttgagtggaaaaagtaaatttaattcataaggttgccttgggcttattgagattttacatacaacatcccaatgggatgacatcatattcaatagagtattatttttaaaaaaatcattagcaacaaaccatcttaaagtatcctagtatttgtaaaacgttatcatttttttatctactcagtctcctaaaataaaatcataaattctttagtaatgttgaatcaatagtatttgagtctggttttaaaacaacaacaacaaaaaaaatcaaaagttacttatccagaggcaggaatttaaaaatgcttgctatcatttgtatatccatgtatttataaattttcttgttcatccattcaattttattacatacctgttctattttaagaggaaatagataggtcttaagattatccatctagaaatatataaacatagttgtgatttatacactattagtgaagtcaaatactgcctgcttagcaaattatgccagagaacaaccaaaaaaactagctatataagttttcaaaaaataatttttattgtggtaaagatacataacataaaattagccatttaacctttttatgtatacagtggcaataactacattcacagtgttgtgcagccatcaccactattttcaaaagttttcatgactcccaaacaaactctgtacccattaaacaatagcccctccctgcttatccctcctttccctaccctctggtaacttctaatctactttttctctctatgaatgtgcctgttctagttatttcacataagtgggctcataaaatatttgtccttttgtatttggcatgtttcacttagcatgaattacttatttcttacgtgttgtagcatgtatcaaaaattcattcctttatgtggctgaataatattctactgtacgtaaatgccacatttgtttatctatttatctgttgatggacacttgggttctttccaccttttggctattttgaataatactgcatgaatgttggcgtacaaatatctccttgagtctctgatttccattattttgaagatatacctgggagtggaattactgggtcaaatggtaattctgtgctgaagtttttgaagaaccacaaaattatttttcataggagttgtattattttatatttctaccagcaatgtatgggggtttcagtttctccatatccttgccaagacttgttatttttcttttttcttttaaatcatagccatcctaatgggtgtgaagtgagatctaattctggtttgcatttccttaatgactaatgatacttagcatctttttcatgggcttactggctatttgtatatctcctttgtagaagtgtctatccagattctttattttttaattaggctgtttatctttttattattattattattattattattattattattattatctttgagacagagtcttgctctgttgccaggctggagtgcagtggcgcagtctcgactcggtgcaacctccacgtcccaggttcatgccattctcctgtctcagcctcccaagtagctgggaccacagatgcctgccaccatgtccggctaattttttgtatttttagtagagacagggtttcgccatgttggccaggatggtcttgatctcttgacctcgtgattcacctgcctcggcctcccaaagagctgggtatctttttattatttagttttagttccttatatatgctcaatattatagtcttatctaatatgtgatttgcaaatattttctcccattctgtatgttgtcctttcattttcatgatagcatcctataatgtaaaaaaaaagatttacatattaatgatgttcaatttatcttttgtttgcatctgttgctcatacttttgttgtcatatccaagaatccactgccaaatccaaggtcctaaagatttcccctgtttttcttttaagaattttatagttttagcattgatccattttacattcaattttgtaattgctatgacgtagaggtccaacttcattgttttgcatgtggaaattcagttgctccagcacagtttgttaaagaaactagtctttctctattgagtggacttgtacccttgttgaaaatcaattgaccatagatgtatgggtttatttctgaactttcagttctaatccattggtctatatgtctatccttatgcaaatgctacaatgttatgatgattgtacctttggtgtaagtttcaaaatcaggatgtgcaactccttcaaatgtgttctttttcaagactgctttggctattgggagccccttacacttccatatgaatttgagtatcagctttttcatttctccaagagaaggatgttggaattttgataggcattgaagtgaattttttttgtttttttttttttggagacagagtcttgctctgtcgccaggttggagtgcagtggtgcgatctcagctcactgcaacctctgcctcctgggttcaagtgatgcttttgcctcagcctcccgagtggctgggactacaggtgcacaccaccacacccagcaaatttttgtatttttagcacagatggagtttcaccatgttggccaggatggtctcgatctcttgacctcgtgatctgcctgcctcggcctcccaaaatgctgggatcacaggcatgagccaccgcacccggccgaagtgaatctttacattgctttgggtagtactgatatcttaacgatattaagccttctaattcatgaacatggaatgtctttccatttatttttaataatataaatttctcaggaatttgaatttgacttctttcagcaatattttatagttttcaatgtacaagtatgtacttggctaaatttatttctaggtattcttttagatgctgttataaatggaattgctttattttccttttttgcagtgttcattcccagtctagagaaatgcaactgattttttgtctgtagatcttgtaaccctgaactttgctgaattaatttagatgctctagtagttttcttatggattctttgggattttctatataggatcatgtcatctgtgaacaaagatagttttactcctttccttccaatttgatatattgtattctttttcttttcaaactgatctatcagtaacttccagtacaatgttgaatagcattggtaaaagtaggcatactgtcttgtttctcatgttaggagaaagctttcagtcttcccattgagtgtgatgctagctgcacattttttgcaaatgtcttttttcgtgttgtagaaaatccttttttagtccagtttatctgaatttttaaataatgatgtttacttttgtcaaataccttttttaaaaaaaaatcagttaacttgatcacgtgtgttttttttccctttgctctcccaatgtggtgtattacatttttgaagcacctttaaattactgggataaatcctacttggtctaattatgttaatatgatgttggagttggtttgctagaggaagctatatgagtcttgtatattgctagactaccattcaagattgttttggatgcctcctttggcaaggcttttctctatgagaaatgacaaaacatttgagtctgaactatttgagtgcatcaaaatatttgtgtacttaaatttttagaactagtctctaaggaaaacaaaaacaattttatctataatgttagagatacttaaggagtttctactaggtgttaggtgatgggctaagtgtttttactatgttatttcatttaaaaagtaacaactgttaataaataaaaggcaacaactcatattatcctcattttacaaatgaggatatggaagcttagagctagtaaattgtaaagcaaggggttttagtccctttcttcttgacttcagcctcttactcctaaatctatattattatgtctgatctgaatcataagtctgtttacaacactgcaaaggaggaataatagtggctacaactaaagaataccatacgatggggtcatttttatatttttacattccccaattcagaactcttgaaacacagtaaagagtggaggaatggatgggaaaaatattaaaggaaatccaagaagggcatgaagaaaatcttttaaattctaaatgcacatgaatcagtctttgtcatttctaaatatctgaggcattttagaggtcaccaagatttttcagaaaaacaacgtgattcttctatgtaaatattatgatagaacaggtgtgttggctagcgataagatattctgccaagcaacaaataattgcacatgaatcccaggaagatgtttgccctcgggtatatttgaatgtaatttttaaaatggcattctattttttctcagcatcagaaatagctgcatatccctattttgaatggtaaggatgacactattttaacccaatatattttatttttaatgttctaaaatgttactgtgaaatgtgtcttaagatacctcctttcctaccccaactctcgtacctggctaaagccttaaatttttttgttttttatttttcttatcgtatctccattaagaagtcttctcaggttttccaagccttggttcgccacttctgaattctcccatagcatcctatacttacctgtctgtggcactatcactgcaccattctgttaaataagagaagaaggaaagcatcattttacccgagatttgcgttttttattagcaatgtggttaatccttgtagttaataagaaagcacatgttcttaatgttgcaaataatcgttcatgatttaatacttaagtaaaagacagggtaggctgggcacggtggctcagacctgtaatcccagcactttgggaggccgaggcaggcggatcatgaggtcaggagatcgagaccatcctggctaacacggtgaaaccccatctgtattaaaaatacaaaaaattagctgggcgtggtggtgggcgcctgtaatcccagctactcaggaggctgaggcaggagaatggcatgaaccctggaggcggagcttgcagtgagcagagatcgtgccactgcactccagcctgggcgacagagcgagacactgtctccaagaaaaaaaaaaaaaaaaaaaaaaagacacggtaggggtggtgaaatgttttatggaattcagtagtgatgacagattgaatagggaggtatgaacatatagctatataattaaggctgggaagtttcatgtcctgatcagcaggtccatcataaagaaatgttgtatgtacctcatgttttcccaccactctgatttcatgaagagtcactagagcactccccagtgaaggattatctgatgttactgcttcaatttttgacttcacctcatatggcatttatgtttttatgaatgaggagagataccattggaggaggtggtgattttaaactggacagctggggaaccaaattagataaatctgaaactccgtgcttaaagatgacaaggccgttagtatgaatgagtagatgtataatagaagtattgtgcagttgtgtatatttgtggaaggaaaagaggaaggaggggatcaggcagagtgaggaggtatttgtggagttattcacatgaatattgaaatcttccataataagaattgtgcactaaaagaagaaagtgatgtcagataatcagattgtatgggttcaaatatgaagaacaggcataaaactgggaaagggactgtctcaattttgcatagtgagatagtgggacaatgagtccctcccatgtgataatttactgtcttttggttcagggagaattttgctgtgatttcatatctgtgcagtataactggaagaaattgttaatgtaatttcaaatattatctttgaaaaatttagtagttgggtagatgatgccccataatgcttttatgttacctaattggtaacttgttaacatttttatttaatatcagtgaagaaaaaattaaaattaaatggctgctataaaatgtgattagtaattcaagtgacaaaagtggaatgtctctcatctgggctcatgcatatttttctccagcttcctccttagcaatatgccccttcctactttctgtcagccagtttttactgcatgtaaataaatgcatgtaaatggcaagcaaacaaccctttagaaatgcttttctgtctgaaaccactgctttccacatattttgacagatacacagacagtaaggtgtacagtgcttttcacttttctccttgtttctccgtggttctttgctggctaccccacatatatatgattttttctccaagtattatagtatagtacattatttaatgacaggatctttctttttgaaatcttcctccttcccctagataccaggctgtatgcagagcagtcaataggtaatcaataaatgattgacgagtgaaaaatcaattgaatgaataaaccatatggaatcttttaaagaagatggcaattgtgtgttaggtatatattttaaatgtatggcctgtgcatttaaatgtaatagtttaatattaaaaatgcattttatatttttttctggatgttcaacaaacatagtagtatgaaatacataagtagtttggaattttgaacgcttttctccatggcacctctctattgcctttgttttctattgtatttcttcagttatgtcaaattaagcaatatctcatagcataatttattttataggtggtttaaataaagtgcattattttaacccctaaaacaaacttaaaggttgtaacaaataaaacaagtgcagcagtaaaatgcatgaaagtatagttgtattacttgataataattaccatttgctagtacaattttattattataatcacatttatttttcttgcctttaaatttgactctgtcaagggtgtgattattgtcaacatattttttcactctaggttccaaattttttcctttatactcaacctgtgattgtccacatggggttctggttctgcccagccggtccttcatcatttctctctactctttcacaccagcatgtgggctggctgaaacctccccatcattaaaacaacctctttaccctatgtcccctattccttcataaccaattttttggaaacagcaatgaatgctgaaaatttccacttctttatagtacccaggcttcgttcccactgtctctcatgctctgccttcagggaaattcttctggcagtgacattgaattgtcaacagccagtggcctttcttctcatctattggctttgtggacaactcccttcttcaagaaaatatctcttccttggactcttgtcacgcctttctttgggtatccttccaccttcctttaagttgccttaagggctcatatttttgccactacttctttaactctcgatgtaccttagaaatccattcttgggctgggtgcggtggctcatgcctgtaatcccagcacttttggaggccgaggcaggcggatcacttgaggtcaggagttcaagaacagcctggccaacatggtgaaaccccgtctctacgaaaaatagaaaaattaactgggcatggtggtgggcgcctgtaatcccagctacttggggggctgaggcaggagaattgctggagcctgggaggcggaggttgcagtgagctgagattacaccagtgcactccagcctgggcgacagagtgagactctgttttttttttttttttttttttttttttttttttttgaaacaatctgttcttggatttttcatgtcttgctctgtgttctctgtgctggcccatctaatctaagcccagggcttaaatgctgtcctgtgcaggtgttcttctccatcacgcctgtgtctgcctagacagacccacatctcccaactgaaatgttgcatagtgtcctggtcattccctctcttccacttccctggtaaccttgtaattgtagtcttcatggaattcagagtgaccttctaaagtcatatctctccattgcttatgatcctttcaagacctgtcattgcctaaatatgaaggccaaatctgttggacgacttttaagggaatttcattgtctgatccttgctgaactctcatttgcttttctccactcctcctatctgcaagccatattcatgtgccccataaattgccatactgcttaatggcttctcattttcctcgtgatgccccttttgttccaagacacccaacttaggacagccagtatccctgaaaactctcatttgtaatgacttgtctgaaggaccacttatctagtgaaaccttccttgatctgacctgaggtaagattgtccataatttctccttcgtagcatggcagtaccctgagctatagttcctgccatctgtgccagtttataccgtagtcaggaacgaagtcaaacacgcactttgagctttctgtgattggtccttgaatagggaggggcacgatgccacagagcctcctgggagaacacaggatgcagactccagagaaagcgactgctaaggggagattttaaggataggcaggtcttattttggaaagggggaagcggcagagggagatgatgctagcaggagaggccctggagaggagagtgagagaagggctgaccaatctccttaggtgtgcctggagtatcagttcaaggagcgtaatggagaagggagcaggagctggttcatacgaggcctttacaacatgttgatgagtttggagcttatggtaaaggcaatgggaagccatacaagtttctgagtaggagagagacttgggaagggtacactgtagacagatctctctgattacagtgaagagaaaggattagagcggggccagtgaaatggggtgacaaaggagttagggggttattgcagtagttcagaaaagatgatagtggctgagagtaggtagtagcacagatggaaagaaattgggttctagaaattcttaggagggataagagaacctgtaagtaactggatatctgagattgttaggggaagaagaaatacaggatgctgcccggtgttctgatgtggacagtgggtggtgccatttaacaaggataggcaccagtggggagagtcaagctttctcaggaagatggagatctgtttggtgcttcacgttcctgtgtaacatgaacatagggaaggccaataggcagcctgaaacctagaagaaagtcttatctgcctatcttctttttttaaatcatgtcttattcatcctcaaatgtcttgtgactgttatccagttggctttaagaactctttcagtgaatgaatgaatgaatgaatgaaacaggaatactccctggggtgatccaatcctctccactcttgtccacaaagggcttatttggatcatttagccaatcaagattatcctgctagccttttcaggattcttatcgtgaatgcttctagtacagtggaagaaccagaaacaaaagtacattctagaatacagaaaaaaatgtaaggaccattttcctcctcagtatgaatacctattttcttatcccatatttgtggcgttatctgccttttttctccttgagagtcaggatgtttgtgattttaatgaaggtttcacatagagagccagatcctattttgtgttatccatgctaatgttcagataatgaaaaatggctatagttttaaagtctaagtagttcaaatttctgcagggtacacttaccacataatgagaaaccgaatcatgctttccaaagtggatcctatcaaatatcatttcctcctatatttatattcagtttggagttaatctggcattatccctaggtattatataggaatggtggtaaggattcttgttattcttgcaaaatagtgttgcctaaaatttagctaatgtgttcttgaatgaatggagaatttcttggaaaatcacaggaacacacacacacagactccttacactcactctcatgtaaggagtttagtggaccttattgtaatactggccaaggaaaatcttcagaagagagccactcgggaactgaagatgttctttttggttcctttggcagtaagggaacctgtgagtcaaggttaagactttgagagctaaataatacaactgactaggctttttttcccctaccagtaagcaatccccaaggtcacggactcttgtcttcaaaaattctagagacctgaagtgattaagaattgaactttcttctgtttatcatataccacaagggaagaaatcaagtgaatctgagctctgatgagaaatgcttgggtctcagtcaaggtagttgcaatcagaatataattcaagatgctgggttaggagatcactgatttctgcaaaaagacaagtagactcccccccacccacaagtcactcttgatcttcatttttaactttgctttgcaaattaagcctttaaaaaagcatccttgattgaggtgaaccatgcatacttttaagttacattttgtttaactctatctctgcagtataagtacactctggttgtgcctgtgcacttggagacctgtttggttgaaaatactgaaataattttgtaaaacattatcttatagtgttgagggctgtaatgattttattgtagagatggtctggtcaccaacagtgaaataatacaacttaagtattttttaaagtgaatctttttgcatagatacactcaattatcgtctctgtgctggtgactcaattattttaccctgccaccagatttcatttctgagctttagtttgaatatccaaatgatctcctgacatcaggaccactgccatgtcatgatgatagctcaagttctgccagtttcaatctgaacgcatgattttccctcgagtctgatctacctccagtgttttctgtctcagtgcatggtatcaccgcttgttcagctgtataatcagaaaccctggatagggctgtatccttgctactgttcactcccttatcccacacctaattcatcagcaagccttgttgaatttttttgtttagtgtgtccagaatctgtctcctgttctgcaactcccctgagatcactctagtgcagtgtttcccagctagggatggttttgtccctagggaatatttagtcatctctggagccatttttggctgctacaactggggaattgctactggcatctagtgggtagaagcctggcatgctgctaaacatcctccaatacacagaaatgctcccacaacagagttaaacagcctaatatgtcaattgagacaaggttgagaactcctgctctagtctaaaccagcatcctggatttccttattcctgaattaccacaacaccctttgaactggtcttcctccacctagtacttaaacaatgcaaatccaccttctgtgccctttggggcttcttactaccattagaataaagagcatcctttctcagaatggtctgtaaggccttatagggtcttgcctgtggccacttttccaatgtcaatcaatcttgttgctttctgactttctccattccacagctgtattggcttagttctcatctttgtctgtaccttgttcttcatgcccatggggtttcatgcacactaccctcacctgaaatgctcttctccacacctttatgtaggtaatttctcttgatcattctttagttgtaactggaagattattgtgcatgaggagtgctttttgaaccctgctccagagtaatcttctaatgcaaattctgatagctctggacttaaaaaaaattatgtaggtttgttgtatacttgtttccctttttaaaaattcagataattctgccaggtctggtgatgcctgcctgtagtcccagctactcaggaagctgagacaggttgattgttgaagcccggagtttgagactatagtgtgcagtgatggcacctgtgaatagccactgcactgcaacctgggcaacatagtgagaacctgtctaagggaaggaatgaatattttaaaataattttaattagtatttattaaattaagagattattaaattaatatctattaaatatttatgctgggcagttttctaggtgctttatatatttttaatcatcacggcaactatatatgatggatgttgttacttcttcttgttaccttatttagtagaatctaagatatattttctctaacatctctgaaattaggatgccttactttcaattgcatcttaaatttggcagaacatgatattaattccattttgcaaatgcaaaagctgaagcacagagaggttaagtaacttgcctatgattacatagctaaccaagtgatggtgtgaggactgaaatccaggcagtctgatgccatggaccatatcaattccaattcagtgcctccctgcatcctaatgtcgctgtgaggattactgagataatgcatcaagcatgttagctcattgacatatagtaagtactgaataaatgtcagttatgactattattagtatctttattatttctcttattgtgtcattctttaatgctgtctcttccacagaaaggaagatttcagaaggtcacggcctctgtctcttctgcttctcactgtatgagtttttcttatcactgacctgggtaataagtgttttttgaatgaataaatgaatgcttgaatgaagacagggactattaaagagaattggagtcctattatttgaagacacaaatgtccatcttgagtgattgctttgtgcctctcttatagcacttaccgtgtggtgtgttgtaacatttatttgtgtaattgtcttttatttccttaccagattataaacttcctacacatgtggcattgcatccccagtacctaccagattttcattgtatagaagacagtcagtacatgtcagacctattgactcttgaatcaccctagagcttcagctcagttcaggacttagtattgttacaggagaagattatatctgcaacttttttaataccgtaaaacttttttacattgaaatgctatcatttcccaatcttcaggaagcgataagatgaatattcctgtatatctttacagaattactgtgggttatgataaaaacagtcatcatactcaactgaaaaatatagatatttggggttactttgtcttttcctttctggtttaatttgtgttaagataaaatttaaataagtcagtggtaatttttcagagattttgagacagattgttcctcaatagcctttatttgcttgccttaaaaattaaagaatgagaaaacaggattttaagtattggaagttgtttatctgaattattcacagtgttgcacaataatgaatttatcgcctttccaattggctacacttattggaaggctgaagaatgaatctttttatgccaaggagaatgttaggtcataggcctaaacaatttacctggcttctcccttttggacccagtttcatgtctttggcagctgaatgcaaaggatattgtgttctgccctatcggtgccaaaagttcacagaagagagcatttttggcagacagagcttgttttaaggacaaaggtgtttgaatttcacactctgttttcagagacttgttcatacgctataggtgagaggttcacaaaatcatgcattgtgtactaagcacttggggatatagtgcatgtttcaccttgattgggctgctcagaaagccccatggcggcctttgttacctggactatgcactgagtaagtcccacgagggagcactaagtggaatggaaattaattattgttgtgtagcttcagaattcaaataccttagaacacaaaagaaggatattttactaagtgcagtgaccttttggactgtaggcacaataggcacaatatctgagataagaagtcatgttagtgacaaaaagcctaaagccattagagtatagcaggattctgtcatatatggtcaacttttatacatttaaaaatgtgtcatccctttgtaacgttcatatgaattagtttatagatctaaatacttggaggggtattataaatccatgtaattccccaaacattagatttaacatgtagaattctgttataaagataagcaaaaaaggaatacaaatgcaactttttcattatcgatacatataagtgtgttcatgagtctatattgttttggtcattgtcaaatagccaaacccaaacattttcttctcacaatcggatgagggatttgcctcctttgagctaaaagttgatgctactctgcattagttgttttttaatgtgtatattcttttaccctttaattccatctctactgacacactcctataatacatcaagaaaatgcatagaaatacttatttcagtattattgtaatattaaaagtttaaaaacagctgaaaatacttttccctatacatctggacagataaattacaatattcatccaatgaaatattgtctaatgctgaaacagattgagttagatctgtatgtgctaatgatgcctgaagttcaagacatgtattggcaagtttcagaacagtatcaagaagatgactttattcttgtaaataaggtgaggtttatatgtagtttgcacttttgagtgtattacatcccttttgggaaggtacacaagaaacaatccacaatatttgcttctggggatagagagcttttagaggctagggtgattttgtttttgcctttatatttctctgtcttgtttaaatttaaaaatcaatttcacaaaaatagttgattaatttagaagtgaaatactctgaattgaatctttagctcacattgggtgccattctgttaacaagtgagtcgaaagaagaaaacgtgaagaaaatgaacaaagtgtgtcttttaattttgcctgtggcagaattaactaccacacactccacatgccttcctagtcataccagaagacacatctgtgggactgtatgtctctgctgcatgtggagtgctgcagcttctgcagttaggatgttgttttggcgctccccctactcactgccaacatgatatgtgtcgtgctgtcctttagcgcccatcggtataaagccttttcttagtcgaagaggcccgactctgttgtcaaggccaaattacagcttggataattacttttgttcacttcccactcctctcttgctaatagatagcagtgctatttttgttatgaagataatagatgcttatggattcccccccacaattctttattgtctttccataagtcacatgatgtattcagaattttggtgaatcttctacctctcgttttgtaaatggtcaaaatgaaatttagtcaaagcaagtgacccttttcagagacaagggttgaattaagttgaacagagaacagtaacagatgtgtgttactctctcaaatgtgtgctcttactgtgtctaaagagaattgctgcctttaacccgaaggtgagttctttctggggtatcacttagaataaaaaggcatttatcagtagatatcataaagtattatgatttgggtggaagaaactgctgggaagaaatattaatttaaggctatatatagcatacttttgtactctgtaaccaagtatgtgttaaatcttataatttgagcatttagtcattttttattatacaaatacaagtagaagcaactaaataattataattaggtgacagtataggatggcaataaagatagaaggtctaaattcttaggggccattcatctgttgagagtcataggtcattgccacattgcacctggaaaaccactacacttctatggatctggagatcagcactagatgaatagcagaaaacagctggatcatgttttaatctgaaagatttcaaaatgccaatcagaaccctggcttgctctaattttcagaaatactatgtgaaatgtggatcataaagcagaatttggctctcaatactgaattaaaattattcttaggaaggcttcaattaactccatagcaaaactaccagtgttctcaattttgtagctagagatacttatgagagtggcagatggccacacaaagcaaccatgttattttatttccaaatttatgtaaactgaactcataaatttttaaaaataagacttctcaaatttaccacaacaatcctaggtccccaaatcaaatcttgagatcataaaaagtcctttaaatttgctgatgtgtgtgtggtttttttaaaaacagtaattcatgggatttaaaagtaactttcctgtgcccacaatggttagaacttccacatcctttcttcccagctcacctgccaggtgttgtccatggtagttgagcatgagaactttgtagtcagatacttttggacattgaactctggctctgaagtgactaggagaccttaggcaaattatgtgatcactttaaacctccctgccctcctcacctgtagatagataaccataagattgtttaaagattcaatgagaaaaacaatatgaagcaattaattagcataataccaagtatattaagtcctcaattacatctttttttcttttttaacattggctaaaggaccgtaaaaggaagaaaccatgggttctttaagtcttgtacatgttttaaaaaacagctggtgtaataactaagaagcattctgttgaaccagatagccttgaggtgtggtatgagttcaaacagctggaatagcccaggcactgacaccagagtggatgctggaaggtgagtcttgccagtgtgttggctgaacaccagcttggcccttggaaccccttcttcttatggagtgagtggtgatgctgatatttttatgacatggcattatcattacatatctgattggaaaatagggcatcttaccttcatacggggggaaacaaaaggaacttaaaagaagtcaggagtacagaaatgattctggttagttgaaacttcaaattgtgttctagtaacttgagtttttaacttgatagagaaattgaattaattgctcttcactcttcacatggtgattgcactgtcgagacgtagacaattctatcacaagcacagtgtcacctaaattgaaatcttatctaaagttttagcccatttgctactcagtggtaggaactcccttttaagtggcaccttctgtgttttacattttagcttacttgttaactatatgagagatgggaacaaatgactatcccttatacctataccctgaaaacatacattctaagtataatcagattgttactgcttgttttctggatgggtgaatctctaggattaccctagtggaagacctaatcagtgaaaacaattcgttggtttgctatctcttttatacataaaagttctggctttgttttggctttttatatttttatccaattaaagattcatctggagttttcttctttacccatttgaagtgtcttagttttttttttttttttaggcttaacattttatttatttatttaactatagattggtttgagatgcaatatatgcccaggctattgagtaaaggaaaaccaacatagtcaagaatgctttctgagtgcccacttcgggaaatcccagccataggggagtcaatattgaagtgattatcttagaaagaagtacttttttgccatatcagtaaacacatactcagatgggggcagcaacaaaacaagtatctacacttttcatttgcaaaataatttagctttaaaaaatgtacaggctggaggatggcgatgaggatctgcatcctagaggatgacatagtgagtggaagcaattaaagctcagacattttacaattctatctgaaaagtatttaatgacaagataatgtcctacttattttaagattattttataggctctgctcctctaactttttgctagctgcagaaagttgctagaatgtatttcttggcacaaatagggttctcaaatgtattttcaaatattagtgttttgaaatgaatttcacaccatctctgtgttacagtaagaaaaatgattaacatgagtattttcttcatctggctatggagtggatgcaagaagctgagctttatacttatttggtcatcatcacctttttttgtttcatttcttttgatatcacttctatttcttatctcttcattttgcagtaatagaagaagcctttacagttgcaagattacatatttatatcagggttcagactgtgaattcattattttctagggaagcagaaagatcatgtaaaaatggtgaccacatgttgacagaatgcatgatttaacgaaaccaaaggcaatcatttcaaagaaaaatgttttattttctgccagcagagtataatggagagaaattggctggtattatttttaaaaattgcccaaatcactgtagttagtgtaaaattgtctctggaactatttcctgtaagttaaccagacatatgattgtatcctttctattttgaatactgaagctcacatttcaactgtcttgtatggagcctatcaggtataatagctctttgtaaaggtgcttccttttcttttgtactcttttccatctaagcttccactttcatttacccaaacttagaatacttagagtttgggccttttggaactttgagcgaaatattactcactaacaaatcaagaccataagctactcaaaatgtgctgcctcagtctacagaagatcaagtgaaattaacttaaacagtgtttatactattaaaaattctctacgtatttcagttgaaaggagatttcacttttaacatgtggtccacatggtttgttgcctttttcttagtatttatagtaattacagatattatacactggtacctgcttatgttgtttgtggttataataagtattattagtaacaaaaaattcgattacgtgtcaatgagaggaataatgctatctgatacgattccagtagtcaggtctctctgaataagtaaaaaaggcatgagtcacttggtggaatgtggatggtcatgccactactttggccgctcaggttttcaatggctaaaataggggttggaggtgatatggcagttgctttctggtcagttggaggctgaaccaccccatgagatctaagcctatagcatttaggaagaagtagcatttaggatcagcctatagcatttaggatcagctttgcaaactaaaaactagtataaatatgacttaccttaggaacaaataggagtgttgcatttgtatctacccatggtcaaaagtactggtgtggactagatacagataattgattgatttggatttagcttgatgtcacacagcaaccaacgtgtatttgttgattgcttgatccagatgtttaacattctgtaggaatgttccaaggcattatactgtacatagagagtaaacaggcatacttaaaaaatgcaagctttgccatcatttgaacctctcccacccactagctaaaaaaaaaaaaatttaaaaaagggtttttttttgttttgttttcttttgttttttcaagattgagtcttgctctgtcacctaagctggagtgccgtggcgcagtcttgtctcactgcaacctccacctcctgggttcaagcaattctcctgtgtcagcctcccaaatagctgggattacaggcgtgcaccaccacgcccggccaatttttgtatttttagtagagacaggtttcacatgttggccaggttggtcttgaactcctgaccttgtgatccacccgcttcggcctcccaaaaatgctgagattataggcatgagccaccatgcctggccaaaacaagagttttaatttaatgtttaaaacagagctgtaacctttgtataaaccacactcttctttcagcttacacagctgatatttgttattaactaaaagtaactgttttgtgctctgccttatcagttctaggctttcctttcaaagcgtagagctgaaattatattactgttattaaacagtgattttggttaagccagttttcatgtattgtctgtgaatttaataaccatgcaaactcactggatcctgaaggaaagtcaggttgaatatttacttattgaaggctgaacaatgggggatcacacaccactctaaaactgtaggtaaatgggaaataactttaatgtacgccagacacacgaccagtagttccactaatgttgtatgacaaaaacacaaatgaaaataggatcttcaaatggaaagatgtcctagagaaaaatccttttgttttaaggtgaagaaacacagagtcagagaaattaaatgtcttgaagtcacacagctattactggcagagttcggccagcgctaaggtcccatgacttgtagatcgtatttgattctaatgaataactgtgagttttctcatatttttccttacattgaatagcctcctatgtgtaccatctgtacctacccaattagctctacttattttccagatgacctgtctttcaatttctttattctaggtctgcttacaaatcacttttatacatacattagttgcatccaggacctcccactgatagcatgaacggcaaagatggacctgtctcggatagttcagttagctccctcgtgacaaggatgtaagtatcctgaccacagaggggaagcaaactctacttttcaacaggccatctctctcttttgagtagtagagcttccttgtcactgacatgtttctgtatgccttctggctcatgtgaggatctgttagattgatgccttgaaaacgcatagatgggtggctctccagcgggataagaccctcctcaccgaaatctccgctatacaaataaggacacacaatagctgttgagctcatgtgaaagttgagcacattgacatagaataaagagacattattttccttattcctgcctttcatgtacaaattgttcaagagctcatttgtagtgtgcaatataatagacccaacttgattttacatgtttacatttagcacacagtaacatataaatgaatgcttatagaagtctttgttaaatgagtcaaatgtgctctcattttctgcttgtcatctctctcacaatttgtatagatttgccaaatcaggtatccttgtgcaattcaataatttgggtttattttctgtgtaagaattggcctggtattttttcttctcccttgtcatcatggtccaaatacaggtattgataactatgcatcatgactgatttaaaaaaaagttccaaaaaggcttccaaatgaaggctgtaattttgtattggatttctagtgacatgagcaaatcacttgctctttgcccttatggattttacaatgtcatcagagtctatcaataaaattatagcctacagttgaacatacaccattccttactgtatcgcatatacaggggtgaagggaagcaaattgtagcatgtctgctctgggatgcactccagcaggctgtgtgtgtgtgtgtgtgtgtgtgtgtgtgttctttttcaattgagatccactgtacagtcagtcctagaagctacagatgaagagcagtacctgagcctcacataggaatgtgtctcttgctcccacctgctgtgagtgaaattgactagaatggtgccattctgatcaatttcattaagcatcagacactgcacatagacatcatggcagtccccttcacctaagctgtaagcttccatcccagagggaagcgtatactgccagagaccaggagcatattgtcagaaaaaaaaaagagaaggccacagatgctcctgtaatggaagcaaaaatgaaaagccacatttaaaaaataaaggtaaaaggtcaaaacccaaaccctaaagcagaagagattcagctacaggaaaacaatggttccaaaactcttttgcaaactgcagaagacatctctagatagttgccttattcagtcattccaaatcttggagagatttaacatttcaccttaagtgatttgtaagtatcctgccatcttgaatcctttctctgtaatctcttatgtgttctctttggagcaactgctgtgtcccacattggtggattcttggtctcactgacttcaagaacgaagccgcggaccctcgcggtgagtgttacagttcttaaagatggtgtgtccagactttgttccttctgatgttcggacgtgttcggagtttcttccttgtggtgggttcatggtctcactggcttcaggagtgaagctgcagaccttcacggtgagtattacagctcttaaggcagtgcgtctagagttgtttgttcctcccgtccagagttgttcattcctcccagtggggggttcgtgatctcactggcctcaggagtgaaactgcagaccttcgcagtgttacagctcataaagtcagtgcggacccaaagagtgagcaacagcaagagttattgcaaagagcaaaagaacaaagcttccacagcatggaaggggacccaagcagtttgcccctgctggctcaggcagcctgcttttaattcccttatctggccccacccacatcctgctgattggtccattttacagagcgctgattggtccattttacagagagctgattggtccattttgacagggtgctgattggcagatttacaattcctgagctagacacagagtgctgattggtgcatttacaatcctgtagctagacataaaagttctccaagtcctcaccagattaactagacacagagcactgattggtgcgtttgcaaaccttgagctagataccaggtgctgattggtgcatttacaaaccttgagctagacatagagtgctgattggtgtatttatactcctttggctagacataaaagttctccaagtccccacagactcaggagcccagctggtttcccctagtggatcccgcaccaggtccgggggcggagctgcccgccagccctgcgccattcgcctgcactcctgagcccttgggtggtagatgggaccggacgccatggagcaggggcagtgcctgtcaggaaggctcgggccacgctggagcccactgtgggggagcttgggcatggcaggctgcaggtcccggagccctgccccacagggaggtggctgaggccaggcaagaatttgagcgcggcgtggatgggctggcagtgctgggggaacccagggccgtctctgcagctgctggcccagatgctaagccccacactgtccgtggccggcggtgccggcctgctggccgctccaagtgtggggcccgccgagcccacgcccacctggaacttgcgctggcctgcgagctccgtgtgcagccctggttcctgcccgtgcctctccctccacacctccccgcaagcagagggagctggctccagcctctgccagcccagagaggggttcccacagtgcagatgcgggctgaagggctcctcaagcgtggccagagcagacgcccaggccgaggaggcactgagagcaagcgagggcctccagcacgttgtcacctctcactgcctctgtctactttttgaaaaatttctgattacgcatagacacacagatctggcaaatgtgaaggtctaggattctcttttacaaaaatttcctcctgtccctattgtatggttcttccatgtaggcaggattttcagtgactcggcattctgaatgttactgtgtatgattataaagagaggctagacaggctcttggctgctgctgctttcctcagtttacctcagtttggtgctcactagtaccacctccagagtgtagaaaggggaggagactgttttgagaatttaaatatttctgacaggaaaaaatttatgaatgtatctgtttctttcctccttaccttcctttcctccttaccttcctctacctttccttttccttctctttgccccctgcccttttcccctcccccttcttcttcccctccctctttccctcccttcctcccctcctttcactataataccacttcaaggactaatttacagtaggtttaatttcagtagcactactactggctgtgttgtttactatttttaatcatgacttttaaggacattcagatcagcagcagcataatcatctttcaacacgtacttatcgaagacatactctatatgcaagacgttgtctctcaacattattgcactaataaaaacaaagccttgtttagcatgtacatttaagatattgttaatcacttattttgaggggactacatttgactcattgttaaagggctattttaatttttaataaaagattccttacacatgatgtcaccatagtgagctgattgaacttttggttgtgattaaatgttcaataaaactgtgtggtttaaacatggtaaatggatctatgtattaggttggtgcaaaagtaactggtttttgccattacttgcaattgcaaaaaccgcagttacttttgcaccaacctaaatatagacatataattattttccactctctgggctacttttactaatagactaagccccataaaatagtaagtttaactttgatagtttatagtaaatttataaaacagaaaagtaaaagcagaaacacaatcactcagaggaaactactgttaataattatggtttcttttcttctaagttcagtttcttcattttcctccattttatgcctctttgccatatctttaatgtcacctggctttattgaaaagcttcatacccatacctttatgtgccccataattaaatcctactcccagcaaaggttattattggcactaaaccacaggttgctaattgccacaggagaaatgagaatcataaggggcctacaaagagtttcatttttaaaataagatgccagtgctttcaaaaactggaagattttacattaaaaaatctggatttttggcttctttctgaaaggaagatctggcaactttggggccacattccaatctagtaacaaatgttttcatgaataatgaatatcccctatgtgctgggcaggtgctttccagttttccacaggacccactattccctgttactattcagcagtgagatccagtttccactaatcatcatgcttgcactgctttctttcacctagtcatctttgctcatttgcataattttctttgatcctgcaagtatttgagtttttgtgacccttactttaaatccatttacaatagtctaaccatttcagaaaacgaataaaaaccaaccaaactataccactcttcttacatatatgaattttatgagatgagatatgactaatgcaaatgaatgattctgagaagaaatcaaatagaagaaaatgagagagaaagacagaaggcatttgaaggaccatcctgggacacttaataaaacgctaactttatctaatgctagtaaagctcaaatactacctctaagaagtttggaagtgttgactaattggtgaagttatagctagaggcagctgtatataaaattcactccccttcactcccctaacaatggtgtgtgtgtgtgtgtatgtttgaaaagtgactcagttctacaaccatgggaacatggccatgttgccccattgcccctggtggctcattgaagtccacactgtctttgtaaagatgctgttgagaatcactgccgttttcagaagtgaagctaaagacttagtgatcttttgttgcctgataactcaaaaggacaccttgaggagaaaccttttgagatgaatatctcagcccaaacaaaaccaaataaaatgcagagaaaagataggtatatttaagaaagggctcatgtatagcgtcctgtgacaggcaggcaacaggatatctgccttggtcaaggatcatgttgagctctcagttcagggggaaatgttcaatcatgtagtacacattttgtgtatttcgaccaattattcagtggattataggttctgatactaaagttatttgtggatgctttgtgatgggggcacattgagaaaattgctggctttcattgccccattccaattaagtagtctctttacatcagcttccaaatcatgtgctttcctccatctgagaactctcaacagttgggatcaatgttactattaatgttactttaatgatttgttcaaaatccggaaattcagtgctgactttcaattaagataactgaaacttttcagttttgtatgtacttatattatgatacaatcttttgtttttccatgagcaacttgcaagttcatgcaataaatttttaaaatgtgcctaattattttatttttatgttacatattttaaacatttgttttctatatagaaatgttactgggcctagtgtgttggcgcacacctgtaatcccagcactctgaaaggccggggtgggcagatcacttgaggtcaggagtttgagaccagcctgaccaacatggccaaaccccatctctactgaaaaacacaaaaattagccaggtgtggtagtgcacacctagagtcccagctgcctgggaggctgaggtgggagaattgcttgaatctgggaggtggaggttgtagtgagccaagatggcaccactgcactccagcctgggtgacagagtaagaccctgtcttaaaaaaaaaaagagagaaatgttaccgatatttgtcatcctgttacataagtagacttggttaaaataacgaatttgtaattcctcaaaggcagatttttatgagaggactaagcacctaataaaggaataggagcctatcagaggactgagccttttttttaaatgaagaataataaagttttatttgtagtgatagaaatctggagaaaatttcttacactgagtatgctcattaatatcctaactactgagataaatatttttatttaaaataaaaaacaattttaagcaaatattcatgtcttttttttttttgaaaaataaacccacccacatgtatgatttcttctgattatttcagttggttctgaagtaatcatggaaagatggtatcattagtctgcattatttcaaagtgatattttcccttttactggaaaattctttgtttaagctcagggcagcttgcaattaattttcaagaacttattctgttagaacttttgtagtatattttgaataatatcgtaagaaaagtctttttctgacatataaatataattttcttccccaattttatggtgtctgttcccattatgtgaagacatgtggcctttcttgactactatttcttagacattacattacacattacactgtttaatcgtcacaaagacattgcaagttaaacattactgtatttacttttcagataaagacattgtagctcatgaaataaagtgagttgccaatgatggcacagattttaattgatgagaagggattgaaggcaaggcatgcatgacttcagtgcccatgtcattttggtttgcaagaaaaaagtcctaaagaatgtctcttactcctgtgctacttaatttctgaggctagtaggaccatgtctttttttattttattttatttatgtatttttgttttttattataatttaagttttagggtatatgtgcacaatgtgccagttagttatgtatgtatacatgtgccatgtatacattaactcgtcatttacatgaggtatatctcctaatgctatccctccccactccccacaccccacaacaggccccggtgtgtgatgttccccttcctgtgtccaagtgttctcattgttcatttcccacctatgagtgagaacatgcggtgtttggttttttgtccttggtgatagtttgctgagaatgatggtttccagcttcatccatgtccctacaaaggacatgaactcatcattttttatggctgcacagtattccatggtgtatatgtgccacattttcttaatccattctgtcattgttggacatttgggttggttccaagtctttcctattgtgaataatgccgcaataaacatatgtgtgcatgtgtctttatagcagcatgatttataatcctttgggtatataaccagtaatgggatggctgggtcaaatggtatttctagttctagatccctgaggaatcgccacaccgacttccacaacggttgaactagtttacagtcccaccaacagtgtaagtgttccaatttctccacatcctctccagcacctgttgtgtcctgactttttaatgactgccattctaactggtgtgagatggtatctcattgtggttttgatttgcgtttctctgatggccggtgatgatgagcattttttcatgtgtcttttgtctgcataaatgggctgagcacttttttaaacgtgtgtagggtccagggaagacttagttcctgagtaatggaagcctagaaacaggcatttcctatgttgtctcactttaaacgtttctgtgtgaaatatcatgacccttcaaattaaatcttacatggtaatccgtgccacataaaaacatttaggctctttatatatgtagtctcatgccatagagccaccctaccagcaagggccaaacctactggagatgggaagtacagtagtgaatgaaaaagcaaagaatgattctaattacagtagttaggtctgtgttgcaaagcttggtagagaccccaagataccatctattgtggcagcttcttaacccagacttgggacaggatctgagagcgtggttcaggaagcacagtctgtgcaatatgttgatttgtatacgttttctcctccgtaagagcctgtagctgccgtcaggttttcaaggatgtgacacacggaaaaagtcagtcactgaatggaatcacattccatccccaaccagcagccggcaaatgatacactgagcaaagcactgctttgggattccgaggggaccataaaggacatagaaaccctagctgcattctaacggactcaatcgtctggttaagacccttgtgggataacttgagaagggatgaagacttctcccagctattccaattccagctctcttttagaggcgtgaccaagccaagcattttctccaaatacttctcaggccctactattgcaaaaagtagggaaagggtggcatttgatagcactatttggtcactcatttattggaaaaaaaaatgcctttaagcatcaaggcacttctcatgctcaatttggatccaataaattatattttcattttttcagaaagtaacttttatattaaaaagtttactgaagagagtccagcaaatagttagcctccacaccctatatgcaaaagaaatggttttgccatgtagaaataaacaatcttaatattttgatttgtagcagttcattcagatttggatatatattatctctatatctttatagataaagatatatagctataattgtatgatctcaacacatgctgctttataaactagttattgttgaacatattgtattttctaagccattgaatatttttcaagatccttgttcagtatcttgagaatatcccatactttatttttaaagcttattaaaaatgcagtaaatatcctttttggcaatatgtttgtttacatacttggttattttttcgtaaggttttctataagttagcatgggcctaaagtcgacaaatttctaagcctttggatatgtagttgctaaattgttttctagaagttgtaataatttaggctcctggcaaccatacatgtgcttttggaatctggatgaaaggtgaaataacaatgtgtcttaaaaaaacagataagtgagagaaggagtatacagtttcttgaggctggtgaacttgtattctcagctgtagtgtttaaaaaggggaaccattttatttagtgatctctgtttcacaaaggaatgtggatgaagtataatggtgtgttccttggtgtcaagtaaagcatgtgctatgtttgctagtattcatatgaccataacttaaatttttcatacataaagatctttaaacttgtcaaagcacgctttctcccttccaaatgtgttatatcaagctggaaagtcttcagaagctttcttccacttagttgtgtttcagaagtgtttgaaatcacacttaaggaaaattaaaagaaaaaatgaattttcccactagaaaggtcgtttgaatttgaattccaaagcaatttagtttgggacttatagcaattaacagcaaatctatctactccaaattggaataggtgtttataagcctgaaaataggggttttattggatatttcattaaggaattaagttttcataacaattattatgaaatttatatgggtgattataaattaaataaaaattttatcagtgacttaattgtcatataattataatagagaaaagggaatcatgaggattttattcctatagcggcaatattgcacattagtgataaggacttgagttatctggccaaggttcaaatgccatctccaaccatcattggccttaggtaagttacttttccactctctgttttaattttcttgtgagacagtaagatttatgggaggaccaaggatcctggtttgcccaggaatgtcctgcttttagcacctaaagtccagcatccagggaaagccctctctaaaacaagaaaactcccagttttgggggatgggtgtagaaagttggagggaaaatttaaaaactcatacagtgctcccccgccaatagtggctgaaaacaatgctgtttttagcatcagtcatatctagtgtaggctactaccttccatagtcactgttaccagttttccccttcattgctgatattggcaaccatgaattagatgatgttgaaaacacttggaccttgactgaaatatagtaagcattcaaacatattcatgtttatattaggttccatgatgttctttgatggtgctgtatactgttgaaaaagcagaaataacatgtatcctttcctgttattgatattatgaaaaatagtactatagttctttggagtggtagaaattccagcaattgtcctttgcatggtcagtgaaatgtcctgccgtcaaagggtacccacagttccctctgatttttcctttctgcagagatgctctgaccctttcaaacatttagctgtggactttcctctcaatgtgtgctcacgactcttgttgctgttaatggaagttacacatgtgtgctcaccaggatgagaaagcctttatcccatgtcgggcaaagacccgtgatcctgaatctctttctaaacttgcgacctgaagagagcagtgcagggaattgctgctttctcactgtattagcttcttcaatttccttttaattggagcctgcaacccagattcttgtaacttcagggggatgaacaatacagattaagatctggatgctttccaggaagttctcagctcaaagaacattacacacacacacacacacacacacacacacacgcacacacacacacacacacacacagttgtggctattcacaaatcgcatgcagttgcctaatgagtccatatttgcttctgagttttcacatttgcaaactgcactgctgagaaagtaagtgaagtgttcacccatctctgagtgtgaactgattgatttaatgtacaggacagataaatactagaatagtccaaattgtaaaccagtggcacagaaccttcaagtacaatattttacccttgttcaggacattcatttatcctcaagaattctttttaatgtataagatttcaatttatgtttaagaactagtaaactatagcagtttgacagccattcacacttaattctgtgcattaaaccaacagcattcttttccacaaacatccattgttaggacaatgctctcagacagaatttatgagaaatggaattatgttaccaaggagatagcatttactataatgaagagtagatcctagaaaatggccccttttacagcagctcagagcagagccacaaaagcaattgattggtcttggcatttagtcttatatcagctgtgtcatccatagcttcaggagtgagaacactaatctaaagtgacatttctgttctggcgggcttttctgccctgatgaaagcaattacttcattcctaaatgataatttgcaggagtttcaaccactttaattgataatttttttttgttctgagttcaattgtgaagtgattagctgatttggtaaatagaaatttaaggtgtgaaatatacaagttgcttcaaggtaaagtgcaatttattgggtggaaagaaattacttgataaaactgcagttttttttttccgttattatggaactgccagttgtatagtttaaagttctgggggaaaatgaagaacaaaacactttgattcatgaggtttttggcagacaccaaagcatacaatgaatagtttggtcttgctgtggtttattcaagggttatttgaatcaaggtgaacatcagttgaaaaggactgtgcagacctctcagcgttctttattactattctaatgactcattctggaattaaatcctcttatttaaagtgttaagaatgaaaatgctcattggctaaaaccaattaatttaattattaagttcaaacatacacaaggcattttctgaagatgagggaaggcattcagttgaatggctttaattactcttttgatctattttaccacaagtcaaatgggtcaggattatcccatcagagtatatcttagtttaaaaactctaagtatacatcttgatgttgatactttatcaaatgttagcagttgccgatgttttttgacatttttttaagcaatcaatttcatattttcctacatgtggaaaaataatggtcatttcacatgttaaatgagaaaaataaagcaagaatgaaggtcaaactgatttagcacatcaaacagtctttgtcagccaagcttaatatatcctgagtttgtggaacaaatgaaattttgctgctatgttacactttgcttccaaacaaccattacaactggttttatatattgtgtgagcatcagaccatcaaacagtgcatctttactgacgtgtttctgcagtgatgatctacagcagcaacctgccatttatataagggcaaaatgtgcatctatatttagttgtgaaattggcctattatactcttgatgtttacagaggctaacataaattaatgatgacagctatgagcagcgcattagttaagcagcagagttcttaccttgaacttgaaggttccagttttaacttccagcgtatactatccagctttctttacaccttaaagaagatttctgaaattattatcttttttggagagcattaaactacttcaatttgtgatctttgttgtgcataatcctaccagataatagttgtttgtgcatttctcaattatgttaccgttaccttataagaaagctgatacttacaaccatgccaaaaaaaaatactcttggaagaatttttttcctttgaagtcagctgatttgattgactttgagctctatgtaatgtcaatgtggggtgggctgttttactaaaagtaatgaaggaagggcaagcattgcttatagaatctttactgtactttttccctgggaaggctcctcattcggctcatgttagggcaagtgtaggtactggagtaactatagatttcacagttaactacgaccagagatctgacaagtatgcaggtgttcaaaggttcatgagttaaaatgctgaagcctttgatgaatttttgatggctgcatttttaatacaggtcgaccttcttcctttgaggctgcatgccagattaattgataaatagtagaagtatgtagtgctgggttctcctaagcaaaacaagtaggaaaatccataaaaacctgtctgtctggctccttagaagtactttaaaaaggtaaaatttaaaatggttttgaccctgcttctcctttaccctatagttagataaccaaaacctgccatgctcttttatgaagactagatattatattctaaaagtttacgtgaaggtgttatgtgttcaaactacagcttggagaaggatttttacatagaaatagtgtggatctgtcaataaggtcagtatctgaacctccttcataaaaataaattatttaaaagttgattaaaatatgactatgaagaaatcactgaagaggaagaaacatttggttaagttggcttctgtactctgtggctacctatttttaatccttgttatcctctgtggatgtacagctatattatttccataatcattataaccttctctgtgaagtggggaaccgaagtaatcaatttttcaaagctaaatttgatcaaccacaaaggataacttacctcttttaattaaataagtcatcaagtccaaagctatctttttttcccactgtggacaagtggcccagtaaacaattgacctcttatccagcttcatggtagattcacaaagattgcaaattcttaggcagtttcataatattttctttttgatagcagtagcaccccttttttcaaacttttttggggatatattttgctggcttctagcttgaaaagaatttcatgatttgaccttgcccccaaaaatagaagttgaggaggcagctgctgtgcagcttccccacttctgggcaccacttgtcctgggtgagctctccatggtcctggatctggggctttgcctgattttcaagagaacttttaggtttgtgatcttttgaaagatcatcttgtctagaagtacacatatactcctgattaataattatcattgccatttaaaaaccttcaatagcattttcacaatcttcctgagtaatctgttcttgtaacagctgtttagatactcattttgtaatataaacaaaattgcttgtcctgcaattgaatgtcaccttttatctgttattgtactaaaaaaaaaggctccttatgatcctgcacaaaaaaatttataaatctttaagcatccactaattaaatatatttttatttgaacaactcactaagtacacttatggtatacaatgaatagaccataggcaaaatgaggactgtaataaaaggaaaaatgtgttatgtcagaaccaaggaataggaattatattagtgagaagagagtgcacattattaatgagcattgcaggcattagaaggaaagaacaatcaatgtgaagtgagcttaggttttcatttaacatgtcttatacagcattactatgtgtcaggcaccattgtaaagatcttatttaaaaaagactcatttaacttaattctaacgacaactttataaagtagagtattatcccatttcacagatgagaaaaagtgaggcaatagaagtcacctcaaatgtacataattagtaaataacaaaaccaggatttatacccaggctggctagcttcacaatccattctcttataagaagaaattatagacattaggctgggcgtggtggctcacgtcagtaattctagcaatttgggaggccaaggtgggcggatcacttgaggtcaggagttagagaccagcctggccaacatgaaaaattagctgagcacggtggtgcatgcctgtagtcccagctagttgggagactgaggcaggagaaccacttgaacctgggaggtggaggttgcagtgagccaagatcgaaccattgcactccaacctgggtgacagagtgggactccatctcaaaaaatcccaaaatgacagacattagattattagcctttaggttggtgtgatggactacatttgagaatctgaaaatttactatttctcctatctatctatctatatatttatatgcacacacacaataatgcatataatatccagatacatacatacatatatgtgtgtgtgtgttttgaaattattgacgttgtttttgttggtggtaataatgatttgtgaggatgataatgtagtcatcaaaaagagttgaaattttcatttgctggggattcatgaagaatctcttttctgctattcaaatctaagtgcaagaacattagagcaatgggaagtttaggcccagggagtaaatatttgggtctgaagtttaatcgtattttagatggcagagatctgcactataacattttactcatgtacaactaatctattctatctttagtactctagacatacaaccacaatactttcgtttagaacaaaacgtacaaatacaaagtttattttgggttttaatatagttcttaattcaatgtgaggattgcttataactgggccctactttacataagcgagtgaaagattaatgcacaatctagagtgtcattgtcttaaggtctttgtcttcatctgttacaccagcatctcaacaacctttataatcctttgactgtactttattgcagttgcccacaaaaccaattactacttattacagacacagtgatatcattctgaaagtcttctaaactatggtccctgcataatgatgtgatgtgagagtcatggaaatcctttgttattaagattactgccaagaagattactctaatagggggacaccatgtgtgttagagttaaaaaaagagaaagacaaggtagagaaaagaaaacaaggaggtaggataaaaaaaacataaagtaaattctgaccagtgctattttagaaaagtagtaaaacatcagaacacatgttaggcaaggcatccaaagacattagtgtctgcttattcccttccctgaatggatagagaaaagccatctccctagtatctatcctttatagcctattgagttgatccctgtgatcttgggctttgtctcccatatgaagatgaattttttccttagattattgataagcctatacattaatatcaatttcagaataattgcttaatcttctactttgcttcagttgaataaattcctgatataaatattacggtatattacataagtaacaaataaatacattcgtgatcattctgagtgacatgaataaaggaaaattacctataacatcacgcgaaactacttttataattgtctgtccaaactgttacccaattgtaaaacgagtccctgatccatgtttgactatgacatgttttatttggcttgcatgactttttaaagctttaatttgttaaaataccaaaattgggaaatggcatataaaagttcagatgttgtcctctagaagtggtgacaccaggcatgactttccctaaagtggcattggctcaaactgtgctacctcttggccagagttgtccttcagttcctcccagtccccatcaggcctcttcactcactgacattccctgcctgaaccctgaaagcccttgagttcgtaacccctgctctagagccccatcatagtcacttactggaccaaaaaaaaattgtaagtttagcccaccttctggagtagtatttaattgcaagaacacaaaaagaataaagcactgaacttgaaccgctgctccttcccctatgtaaaagtgttagggaaaatatgtccagagacataatttcttttggcacagctaacttaaatgttgttagataagttacttttattctgtaaagggaggaattcgaactattcttgtatcctaaggtgttaacctggatcctagttatacttacgctttgtcagattctaagacatctctcacttatgtagctttcaaccagctaaaattgagcacttgtagaattgaatggaggctggcccagatattgggaaataagtgacaaaacatgtcttttccttgtaaattagtaatgtttctgcctgactttatcacttgagatgtatcaaggggcaaagattttgtcacctgagactgctgttactctgaaaatgatagcattaacttgtctaattctgagaaagacatttgttagctaatgtagactattaatagagcaaacataaaactggttgggtattagcctagcaagtatctgaccagagcattatggcattacttagattacatagatattcagtaagatatttcaggtgtgatttctgcagtgaatacagtgtttacaccagaaaacaatgtcaggaatcctataatgtaatagggaatattattcaccatagtatattaaaagagaacggagccttgctgctgaaccaattttgatctcttcctttggtcttccttccttccttgtttctctctttcttattatttcataatgaaaaaaaagaatgctagactcaaatatttacagtgctttcagaattcaataaaatgcatacataaaaatgattttaatagtaccttgatactgaaaatattatctagctacttatcattgtggtctgatttttaaatttatttctcatcagacacaatacagagcaattcagagcaggtagaattctcctgtcagatgctcacacacaacttcagttgtgccagattctgccctcagcaatgtgagcaaacttcaaacagaaatgcacatgaatagttgaaggaaaatgctggatcccacctgttgcctcttctgggaagtaatatgtctataatgtttataaattttaataacccatacagcgctttatctttcaatattaaatttatattttcctaaagtttgacttctttgggcaatatattttattctctagtatcttagaaaatcaatctactaatgtatgtccattaataaataagtatgctcttatcaagcagttatcagcacatttataaaattacattgaaatcttcattttaaatatgatgttttcttcatctaactgaacgtgctgtgatctttattgagggctggaaacatatttgttgattctgacaaggtgaattgtattcgtgtttaccttctgctccccaagattataattgaaatgaatttttcaaaatagttccttttgatgaagatcccatactgatgaaagttaaatgaacagaagtattagtttgaaatagatacacgaatgtaagcccaacttataaattgattctagttgataatatcaagctacgcctgtaaaccttctgttaggtcttagaaacaataaatacacctcaatgcatggacaattgaaggaaaaaaaccttaacaagtaaaacacaatttttactcattggacttgagtttacaaaatgtaaggccagagttagagtttatggctttagtggacattttctggaactcattttactgtcactctctagttttgaaatagtttttggtagaattttggtgggaaaaaaggaaatacaaagaaagcagtatttgaatgatgacagagtcacatattctaaaccacacattctcactcctttgatttcagtttacaagcattgagaaaggagaaatcccgagatgctgctcgctcccgccggggaaaagaaaactttgagttctatgaattggccaagttgttgcctcttcctgcagccattaccagccagctcgacaaggcatccatcattcgacttacaattagctatctgaaaatgagggactttgctaaccagggggaccctccgtggaacttgcgaatggaaggccctccacctaacacatcagtaaaaggtaagttttaggtcactgttcagtctgaatatgatggtctgtaggggtctgtaagacaaaatgtttaccatcatcctttcttcttttcctgcatatcaaatcctttaaagggatacaaatgtggaaatctgaactctgcatgagaaagacaccatgtgaaggtgaaataaacctcttatttttctattttattttcaaaaagtctatcagcctaaaattctgtcactttatataagatttcagagaaatgaaaatgaaatgacacattaaaatgcttcttgggtttaatgtatgttttaccattacatacaaattcttcttcatgagtggggtatggacacatttgttaaagcatagagctgacattttctgccttaagtaaccaaagaaaggcagggagcatagctcttccatctttagcaggcattttaagttaatgattttattgaccaatgaaaatcaatctatgtattagtgtttcaattttctctatatacatattacctaaaagttgtaaatataaacatatattttttattcaaatccttgatgcagttactcttacaacttagtatctttaaatgttaggtctttctcactctgatgcctaagacaggtattttcttgtgtgttcctgaaattcctaataatttatggcatttttggcatttaaatatgcatggatatatttatttatgtatatgtggtgttggccattggttttctgtctttaagggtattctattcaaggtgtatggcctaaataatctgctaggttcttatgttcaaatcgtgtatctagacactttatagcatgaaataaaactgggcatttggaggaggtgcaggcaacttcctctagggaagaattagcttcttttgttacatcttgccaactacctttggaaaagtccctgtactcttggctatgataggaaagggtactagtcgggagctgtaatcttttgtaggattcagattgaaatgaagggtcaaaagcagttattatttacaattttgtgctaagagctgtgatcatatatgtgtccgtgagagtgtaaatttgttacttggggattgtgttatgcacattagaggtggaaaatgataatttaaattgtaacaggttattttcttctagagcaacagttggcaaacattttctgtaaagggccatgtagtaaatattttaggcttaatgggctactcaactctcctgttgtagcataaaattagccatagacaatatgtaaacaaaacagcgtggctgtgttccaataaaactatatttacaaaataggcagcagccacaacatttgtcccataggctatagtttgaagaccactgctctagagtgtaagaatgacacttaaagattgaggagaacacacaacagaggtacctctcaaggacaggatgtcagtcaaaggtagcccaggaaaaataaagcaaggcacattcgagttgtccttttacatcccttctgcccttgagcatgtagatatcaattcaataacacaccaattcatgttctagattgtattatgctataaaaaactacccgagaatggataaacaaaaaaggtttaattgacacacagttccgcatggctggggaggcctcaggaaacttacaatcatggtagaaggcgagggggaggcaaagaacgtcttacatggcagcaggagagagaaagaaagagacagcaaaaggggaattgccacttttaaaccatcagatctcgtgagaactcactatcacgagatagcataagggaaacggcccccatgatccagtcacctcccagaagctccctttcctgacacgtgggattattaatgcaattagagacaagatttggatttggatggggacgtagagccaaaccacattacagatattagtaccaaatttttccaagctaaagatgtaaatataattgtgataaatatacattagatacattttttccactctagtttgaggcacaggctatctttattccagatcacacaagatgaaaggatgagggtaacaggttaggaaccataccatgtgaaaaacatgtaataattattcaaatatataagttcgaaaaatatattattcaaatgaaatgatggaatggacctgtatttatttaacataactcagaaaatttttatttgtttactttcattgttaaaggggtttgtagtcaataggctttcttggcagtcatggctaccaaagtagaaaaatgtgatggttctgttatttgtccatttgtctgtgatgtagtagtccagcttacttccagaatcatggccttttaggcatgcgaatgtatagatcacatgtcattattccctcattttatgagggatagttagatgaggcaagtgttaagtggaaacgactttgcaattcagcgttagcatatctaaggcaagaatccacttttcttgccttctgtctagtgctctatcacttcttgtcattactacagataatatttgttttctatcaccatcatcagacgttttaggtgagaattttctcagcttcagactgtttctaatacttcatttttattttgtggccttcaattccactctttaacttcttagtatgattaagatgtataaaaagaagataaaatgtggttgctgcccccacgttgttgcagtttctggaatggcatggtagtgtcactgagaaaaaacagggtggtgaagatgcatgtttagaaacctggaaggagataacagactttattatatttaaaattccatccagatggtggcagagcatctaagttggtacatattcactttcactattagtaaactggtgataggttagaaataatgaagatgtaaacatagtgactccctactgtctaccccggctctcaaaagtagctagaaatataaggagcactttctataaactggttctactgtaaaatatatgtacattttattgctttactctagttctttaatgcaaaactgctattcattctgatcaaacattcataaaacaataacatcaaaagaaattcattttaatttattaaggtcttctatgttgtgcccttgaagacgttcatacggataaacaagcttatataaatagcctgcagcatcatgtgaagtgcagttcataatccagcaataaaacgatagacattatacttcatgcttctccaagcaatctcttgaataaacctaaaggcatttggcaattcgtatgaaatgtacttacattgtggtggcaacattttttaatgtgatgagttgatcatgttaataattaaatttcaaagcttaaatttaaatttgtcccacacaactatatagaaatttaatcattttaatttatggcttcagaaaggtcctttactgtgccctgtgcagtattcatcacatgttttcttaacagtccataaaggttgatgagtttgttttgtgattcccattgtatacagattattacaagttatgcttgcagaaagaacactcaggtgacagtatgtaatatgtcccaagtcaattacttcatggaaatgataggttaagcaattggaaggtaacagatagttttttcccttattttagaaatatctgtgttgttataatacagatcaaatctacaatgaacattatgcgttattcaagaaatgaccaggcattctcagcagtgtttcagctaaataactgatgattgtaacctttaaagaaatctcattgtggtgactgttggtaaatcacttctccattcatagtaatctctatttagaggctatctagaaaccattatatcttttattaatctttaaagcaatagccactgatttgacatttgctaaaactagataaattttctgtctttctaatatcacagacttcagtcaattttaagagtctgtcgtctgctgcaactctattaatctaggaatatttaccattgcagtcataagttttatttcaatttaaacattgcagcttttaaacaacaatttgcctatgtgtgtgacaggtaacaatgctaaaatatgtaaagtataagaaattcttagtctttggaaaggaacagttgaaaaatatgcaagatatctggtgattaaaattgactgaacacattagggaagaactttactatttccatagaatttcccttcactatttcgggcatctattgtgaattaagtaggagatgtttctgagagtagagacttgcaggcttgtatttaagcaacatattagctatccctagccaaagactagactcttactaaagcaatgatgtttaatggatttattttaaatcatcgtgtagtgtaactgagtacaggtcgtactcagagtgacactaaactactgttataatattgtcccccaaaattagatagcattttataaaatggattctgtttcaatagaaaggtagagactccaagactgagtgataggtcatcttggtctaagcagttcagggattttcctgttgctgttgtggcattttcctgtgtgctgacatacatttacttctaccaagtgacattcatgctatggggcaagggtcatattcctcattactaaaaaaccatgtgagatgaaagttcatagaatcagtacatggccatggacacccagccgatgacattcttttgtctttttgcacgggtaaagggaagaacccagactgtacaccttagcttctgagcaggagcctcctacagggctagacgagtagggcaaagatggtaactcagttcttgcttgactcctcttcctacctccatcatcctcagcagactgaggaacagactccctgctctgatctctacttctgttttgtcccaatccatagtaggtggtgggtacccagtggaaacagaacaattcagaggctgagctgccagtgttcgttgttgtttattttgggagtgagtgccaggttttactaggacatggaaatgtgatgtatttgcctttacttaggtatgcttccaggaaggctttttaattatatgctgttatacttttgtatatttctaatgaagttatgacttcatttaaggagctcatttaagaactaaccttttatcttactttattttacatcatgataggacaagcaatgtttatatcaccgcatttcccaaggactatcatctttgacactgggcaggaagggctttctgacaattgcaggctaaatgatgagagagtatgtctctgagactctaattctttggagttttacactttttcatgaaaagctttggtgactacaaaggtgaactcttgatcattgaattattatctaactcagcatgaaaaatattatatatagcattgctggtatcttgctgcatgccactgttcaagagtttggcttgtcactattgttttcagtgcatctggtacaacggagcattcaggattaccctcagctccagacagtgacttgaagaaagcatatttttgagagtgatggctgagaatatgtgaatattcaggtgtccttgtcaactattgccagagaacaagcaatcacaacatctaagtggcacacaacaacaagcttttactcatggagctgcggttaggctgcgaattggcaagtctagactgggctcagcgggtgcctctgctttgtgctacagctctggctgggcttggctccttgctgggggttcagcctagctctgtcccatgttagaaggcagcacctatttggaagtagttctttcatgctgatggaggcaaaggtgtaagaagggtgaacaaaaacaagcaatgtctcttaatggtgtggctcagaactgtcatggtgtcatttctgttcagtcgttaggtcagagcagatcacgtggcacagaccaaagtcaaggggcagggaagcacattgcacctctactgggagatactgcaaagaaacatggccaatttcacagatagaagatgaagaacatgaatctgtaatttaatttaccttatccagagtagtacttgtgtattgtttttatctgtagtttttgtttgcccaaaagcagaagtgggctcggcatggtggctcgtgcctataatcccagaactttgggaagctgcggtgagaggattccttgagcccaggagtttgaggttacaatgagctatgattgcaccactgcctagagggagagcttgtctctaaaattttttttaaaaggagaagtagaaatgaggattttttttgtggagactttggaaatgtgggcaaaagagtacagatgtgctcttttgcattatgcattaagattaatcaacctctttctatcgccactattaccttattttcctgtagcaacattgagtggtaaaacccatccatttctgcctttgactatgtcatcatctgactggattgctcttttcctttgtaggggtaaaagtgtaataacttttcctcgcctatcacaagggtcatggctgaaacttccataacaaaagacaggttatcaagaaaaaatttatttaatcaaaattttacatcacatgggagcgctcagaaatgaagacccagagacccagggagaagtgcatattcttaagcttaggttcgatgaagaatggacagctgtgtagaaatatgactggacaaaaaaggcatgatgtaatgataataacttgaggggaattccaacaagtcctgtgtgttcagatttttcttggcctctctgtgtagcatttcttcctctgggcatagggcatgacacttgtcatgtaagggtcttcagggaggagaagagagggtcagatagtcttcctagattttatggcttgctttggggtacagcagttctatcgtgcatgatgcaccttcaggaggaaataggggaaggagaaaggaaggaaaaagaaggaggtcagagagaatatctttttacgcccttccagtctccttcagttcaaagtattcagcttgtcaaaatgccatacttcacagtatcacattctgagacccaacaccttctattgggtttgcttgaactcctattcagcattcacatcccagctcagatgtcactctcttgtgcaaatctctgcttccccagagcattagtaatttctttctttagggtattgttacattattctgttggtttgttatcaacttaaatagcaatttgtttctttacatgcctgtctctgtattgagactatgagcttattgaggcaatagcctgggtcatcttattcctttttatatctccagaaccttgtacaatacctatgaaagtaagtatttaactatgttttaagttgaattgtgtagaattgaattatatcttgggattactattagcggagttatatagtactgataagaactatgggtgagtttaaatcataaactagggagatgcaaaagaagagtaaaacaaggaagagtagaagaaaaatggagggagaatgatgggaataatgtgaaaacaaagggaaattatgcaggacatggagtaggcgctagaagcaggtgtggctccctgggatgagctgctagtccctgccctgtggtagggttcccccatcaacgtggttctccgtgtggatgtacatgcagaggaggcgcaggttaaaaactgtagtctcagtcccagcactttgggaggctgaagcaggtggatcacctgagatcaggagttcgagaccagcctggccaacatggtgaaactccatctctactaaaaaatacaaaaattagccaggtgtcgtggcaagtgcctgtaatcccagctactccggaagctgaggcaggagaatcgcttgaacgtgggaggcaggggttgcaatgagccgagactgcgcctcttcattccagcctggacaacaagagtgagactccatgtcaaaagcaaaacaaaactgtagtctcaagaaaaccatgagtattctgggtgtgtgaactggagtccgttgaacaaatacctgagtatcttctcttagtaagtcagtcctctaagtcctttgccttggagatatttataattcatagagaaatgaatgtgcaatacataatggtatgacagctttcaagaaaattaaacataccatgtgactggtgtcataaagccctctctagacctcagttttctttttgtcagtgattctggtctgaatgattacttactgtctaatccaaagtcccaattcctcagaaaggatttagcgattattgtcctaaattagactatttgagactaatagtcttccttggactatatggtttcttgaagccgtttattaataatttcaaaagccacataccctaactcttaatattttgctaatatttctattttccttttcttttacttaattcccctgtacatggaggtaccatatctcccttctatgtgttcaaaaatgtatggcaaaaaaaaaaatttttttttgtttgtattttcaatatttgagcatgtgtaatcattataaataagacaggagagtaagatagcacataatgaagttttaaagaaatcaagtacaaaatatatgataaagataaaataagaacctagcacttcatatactttttctttgcatttactctcttgagaaaactttagggaacacacttatattctatatcacatccaacttattttaaaaagtctaccagttcttgataatgtaatattttagtcatgacatcttgtggttttgcattatactgcactgtactcacttatttgggactttcaagtttatgtgctctgttctttaggactggaattctttaacgtgtttttgttagccttatcacctcttgcaaagcacaatatatagttccagtgctctgcagatgataatatttcataagcatagcaaagaaggactcacctctgactgctttatatgattgaaattgtactgtggctttaattttcagaaatggctttctggatactgtgcataagtcttagctctgccttaataaacaggtgacctccacctgtgaaaactaatgtgtctttgaatattgattgactgcagcttttcagatcctttctgggtccatagtatgttagtaaatgtcagaacctcagcattctaaaggaaggccaatagatattttttttgttaaaagaccagattgcctggtcttttaacaaagtcagttacagagttggaactagaatttgggcctctgtgatcctagtttagaacattttcttccataataaagagacttttctctctatgttccgctacttacgattggaatcccttttccccatttacattatatgtgaacatttatccacaaatctagctcatgttagaccctggcccattttagagcaaatgataacattttatcatgttatgattctatgaaatcacaacatgattctatgaaaagaataattctatgaaaagaataattttaagaaggcattaggaaactggctgaagcatagatgggacctttctgtagtgtctttgcatcagtacacgaaattctctataaatctaaaagtgtttcaaaataaaaagttttattttaaaaaaatcactagaattcactctgatgatagaaacattagaaaaacaagcctctgtccaaatggaaacttgttatttcccactttcctgcctttctaactggtcaatattgagtccccaaatgctcaacattctaaagtgcttcatggctgattgtattaggaaacgtgattaactgacagttacaatatcaatcaatggaaatggaagggaggaaattggttagtctgtttacatagtttgcttaagactttataactgaactattgccatagagagtcatacataagttttctttaaaatttataaattatttccatttaagagtcatacatgagcacaggtgctctggttagtctccttctttttcttgtgaaggttatgactagtattacattttctattcttccagtcttggtcaaagagtgcctaaaaggcaaggttagaaagccaagacaaaacctagttatagagttctataacaggagtcagccaacgttttctgtaaaggatcagatagtaaataatttagctgttgttggccataaggtctctgctgcaactgctcagccctacttttatagtgcaaaagtagctatatagacaagctgtaatggaatgcatttggctgttttaataaaactttatttgtggacattgaaatcaaattatgacatgtcatgaaatattattcttaagagtttttttcaactatttaaaaaattaaaacaacaaggacaatgcattcttagcttgtgggtggtacagaaacaggtggcaggctagattagacctgcatgcatgccatagatagccaactcctgttgggaccattagaactggaggtggacttaggtacctattttagaaaccattatggtagaaagcatactttgagttgtaaaaggtcgattcttgtatttgtttaaaacatattgcaacaacaatgaatggccagaaatatgttttttaaaaaaattatcttcagtgctaatgtatgtacataagtctatttgtcatgatggctgtcatgactaaattatgtaccagccaggagtgtgatgttggcatgtttcaatagctatccatagatgtatatgcattgtgtatgtcaccgaaaaaattaagtgaaaagtcatattaagtcagtggtatcatttggcttattacttttggcagctttctcactttaatatagcaaatgatccagactaaggctattcacatagtctttttaaatgcatgatcttaatgaagagaagcatgatgaaaacattgtctacacaggactattgtttggtcattttgacgtggctaatcaaacaactgatcagtttaggttaattaatagttttgatttatttttccacataatttattagttgtcttcctgatccaactgatggtttaaagtatgttgtgactgtaaccatcattaaaaatcattagaaataagatgtttgagatctgtgtatttagtggtattattatcagcaatacaatgaataaaattggtaaatctaacctagttttttgcgggtaaaatttaacatatctccaaaaccaatgtctatataaaatgaataaatgtggctaaattatataacataatataattttcataacttacactcaagaaaccaaatacagttgctaggaaatagctcctgtggtcttctgctgttgcccattgggagcagtcagtcaccaggtattggctgagtgctccaagggtgaatgctaccgtactaagtgcttgaaagacactaaaattcagtgagttcataggaataacttcccaaagcactacagatacttaaatttcagtaatgttttgtaattaaagcatattatttacgtataattttacagtttgggaaataagactgttgaatatcagcactgatgataaaaacagactgtgtacacagtttgggttttatataaatactttaaaatattggctttcttctataaaaatagatgaatactatccaggtttttacaagaattttagcataaaagcaaaattgctattattttccattttgaaaagaggcatgaagataacattaaaaaatatgtaaaatgcagtatgtcctagagacatatgaaaggaagcagggatgttgatgcaggtaagcctcattttggatgttctcagggacgtttgtaaagtggtgcagtgatatttgcttagctgacacctgacctaaagtgcttttcattatatcttctatggatactgagctcctgaagttgcagaaaaatctgtaacaagttgttcagcctctgctatgttgtgattcacatctggtaggcaatcagactcaacctccttgttgtgagtcagtgactgaatttgttgctatacgaacaactccaattggaaaactaaaataatacttttactgagattagaaaaggggactcttgctagggtgtcttagtttggactgctataacagaatactatagatggattggcttaaacaacatttgaaaaaaaaatttctcacagtctggaggctggaaatccaagatcaaggtaccagcatggtgaggttcttcgtgaaggctatcctcctgggtcacatagccattttcttgtcatatccgtacaagatggaaagagaaagaaagattatgtctcctgtgtctctaatctcattcatgagggttccgccctctgtgacaattacctcccaatgattccacctccaagtaccatcacaatggggattttgactttcaacatttggattttaggaggggacacaaacattcagttcataacacaaggagttctaacaacctgtaataaaggtacagttcatgtatcccaggctagagaatccagcaaaatgtaggaatgcagtgaaaattaatcatcccggtcattttaatgtatcttcagaatggcttattggtagtaaggttttctggtcagtggagttgaacactcctgagttcaaatctttgggactgtgaacacatttttttgcttcagttttcttgactgaaaaaaatggcatagttggacctgtgaacccagcttgtctataccgtctactgcagtgagctgagattgtgttgggaggcttatattcacataggaactttcaaaggtatattaggattcccgtttgtgatttttagtacacattctaattagggcttttgtttttaagattatggttttaaaatgatattaatcagaaggaagaggtagctcaacatgcacagttttttgggggaattctagcatgtaaaaagtcttaacttgtatcatttgataaagtggaggatatttgaagcatttcttagatgatgggtgatttgggtgtgttttggcagcttgatgtttaatacttaacgagacatgtagaagttgattttataaactgttaatgtagatatttcattgagttgataggaaaacaaaaaaattcttaaaatatactgcatctgaaaggaaaggccaatttgctgaaacagtgaatagagctgacatttcctttctcagaattttggcttaatagatataatcttatagtaggttttaagatatcaattttttgttgtcatcagggatccgaaatgggttattttctcctttaatttactcacctattcatcctctaaatatttgaatatttattatattgcaagactctgtactaggctctctgggggatgcaaagtgggggaaaaaagcgaaccatctcctctaggagtttataagccactaggagggagtgacgcattctcaccaaataataaagtagggtattattcatgttgaaagaggtttaagcagacaaagtactgtgggatccaggatgattaacgcgaaaggagaaaaagacggtagtccttattacagttttaaataggtgatcataatgaatatgtatacagtactttcaaaataaaatatcgtattattttccaagtaaattattttttgaacctctactttgaagtatttgccaggtctatattttagatatccgttggtgttggggaatttattatgcataaatatagttaaatatttgaatgtgatgacatttaatgagaattgtggccctccagatgtaaggtaaactcacgatggtttttcctctcagaaaagtattttaaacaggatacccaatgccatgtagaacacagactactcatgcatatctctgttatctgaatatacttaccaaacaactaaaggcatgaatcacataccatacttataaacaagagcttaatcaaacatactcttttagtatcttctctctgatagctttgcttttcatagagatggaaagagagaagtttgaatgaagtgtatttttaagttgtgaaatcttaatgtatgtagtttgtagaaaatcccttggcatctaagacctgaatatagaaagatcaaaagagtagctatcatccagggagccgggaagtcgagtggccacagttcaagcctgctactgaggcagggctcagagtcacgtgctcaccttcccgcccgctcacatgcatctcacttaaagcctgtatttgcgagggaagactagacggtgcgaaagagcatgttttgtacttttatttcatttaaattagcacaaagggagggaacaattttgcttcacatgtgaagtcagtcatttcttgggttgctagctcaatgttttagcagaacagctgttctgtacaatgtggctttctgcaagcaatatttctactgctagaaaagtggcagtctgccaaagagagtgcccagaccaacccctaaacaaaaaaatcttttgtcaacgactctaataatttgtacaattcaggaaaggggggttgcacagtctttgcagatgtgcatttatgatgctatttttaagcagagcagcatgaaagaatagattcatacgaattgtaagttgatcattcattttaagcatttggcttctgctcctgctaaaatttcattctgtggaacgaaaacacagccagccctgaaacgaggtaaggcagggtgtgacaagatgaaattcttcattttcagacctgtgatgcctgctgaaaaacagaaagctttggggtctttctccccagctaaagagataaatgcagtttgctgatcccctcacagcagaaacttgttatccttcagcattttgaggaaataaactcttaatgagcctgcattcttttacagcagtccattctctgaaaatgagtttaagtgctgaaggaaatgccagaagcgtttacacaaccagcgccaaactattatgtgttaattctctgtagtttaacatcatagacaccatgcagtttttctggtatcaaaacctggtctgttttcagatctgtcctctgtgctctggctatcccaaatctacagcaacagactctgctagctttgaacccacggatggagttaagaaaataagatgatttccataaattaaagacccttggaaagaacactcaaacttctactaacagcagaggataaaatctgatagaatcctcatcttttatttttattcaacagtacacctaatatttacataaaagagaattacatctactctagattattaaaatatgaaatcatatactccaaaatgacataacatttaatacagacttattctataagggtgacacggagcagagaagaccatagagtattttaagagaacacagtaaagtgaactgtagaatgttcactgccttgatcaaaggctttctctaattctgagttgggacttttgttattcttatttttcttttaaaatatacgttcttttcatattctgaataggtgtgaaaaatgctcaattaaatggagtaaatgtcgtattaaaccaggggtatttttgctccagtcagaatgcaaaccacttatgttcattttctctgtcccctgaaactgttaccttttatgtatactaatgaaaaacacaaaccgtgattgtgggaagttgctaaaattgcattatttcactctaccaatgcagatacgcttctaaagatagtcattcaggtgacctgctagatcatacttcattgttactcaagtgttcttcaaatattccttcagtttaataaggatttacactgaaaattacaattctgtttgctcgtgcaagcttgccagtgcagggttactacactttgtgaaatgacaagtcctggacaattgtttataaaatattttataagttcataaaaatcacagtttttatatatcagagaaattctcttatgtaaaggatttctatagcaatttgtattttgtaaaatcagttattttgctaaagcaattgatgactcccctcaaatatatattttaggttcatatttttaacgtttaatttttcttaaagtaatggaatgaaaaatctataaacaataaatttgggctgttgatttgtatttaatagctatatattccaggaaaatattggagacacaaaattattcatgttatattcctgtgaatttgcttgagccaggtatgactttttggtttagagcctacacttctttaatgttctagtatggtgatctatgatcattctttacacttacacattaccgtttctaaaaatcatagaattcacatgctgctctttatagcaattttaatattaattgggtagaaaaacatgcaaagatactacacatcattacatttcatttcttataaaacctcatgagatgagcatcatttttctttctcgtatgtagaactctcttttaattattcctgttctttatgtgcaaaagatatctaagtaagggggaaaagaaggggtgttcaaagactctttaagtaaacttagatgctttgtatattgaccagtttttccaaatgaaatgcattcactttggcccttgacgtaggcaaatggttcaagaagctcaaatccattcatactagcctctgtgcaaaaagcaagaaaaactcaaaaatcattttctataaatgcttatctattacaattcatgtagatagtcctatagagagaattggtatgtatttcataataataccatgtagtcttatcaaccattaggtaatgattacatttcagcacattctagccagaaccccccaaaatagattgagtgacagtagcaagaagacagttgcttagattgcggatccagctgatgtcagtagtattgtttttgttagcttgtgagtaaactccacaagaagaaaacattcagatccagtccataaacttctctctagacataaccaagttgctgggccagcgtggactcagattaagagtgtgggtgctttggacggattcatccccacaacagagcttgtttcctttgtttaacaagtactaaactacacttgcacacttcatcactcactcttagttgtttatatgttgaaaccatattatgagatcatactttctgaatacactcaatctgtttttcataatttgacattctactgtggaacagtgagatgacttgcgcagtgttaagtagtgtcaggtttataatctcccaatatctttagttctttactgaattcattcccttcttctgcgttgctctctcttttgaattatgtttgtggcaaacctcacccttcctgtgattaatgggtgttaaaacagtgaaatcggagttctcagattttgttctacaatcacttcccttagctttcgtctacttctacaatactattcttttccccttctctatttgttccctatttaaatgagtcctataagttactacatttcatggtcttgttcaaagaattgcagagcaaaattgtcgaacagtagtaacattttaaataatgattaagcaatgcacagaaaagcagccagtgcaaagcagatatttaagtacaggtttctcagagacattacaatttcactttagtttctagggcgagtagtgctggatggtggatttaggggcggaagaaaactgcccattgcattgtaggccacttataccccatatgtataacaaaccttacatccaaatcacttatatgctatggatctctctgctgatgttagtcatctgatttgcagagaactagaactaataaccttttcaaatgttatcaaatgatgacaaatcaaattacttaaatgatgactgatcaagtatttgatattttaattttgaatgaatctacctcaaggacttgatatttcccttagtttgagtaaagaccacaaatgctaaacagtcacatagttcataaatttcacaaacaatgaaccccgaatgctataaattaactttatttactgactttaaaataaatgaatggcctttagcatagctatagacatagcaaactaagtggaaattgagggaaaagcacctgactggaagtacttttaactatattataggtttgttttggatgcaaatgaatctgactagatttctcagtagcaaaggagacagaagctcttacatgtaggtcatcctgcattttaggttgctaatgattcattttaatgtcaccgtttagttacatactgatcatttatactgacaaaaaggataaaaagaaaacaaggaacctgtcatcaatcattcatttaatcaagtagcaaaagtagataaataaacatactgagttaattattcttctgtatgtaatgattgacaataaagctaatttatgcttattttaaccctttaatatttagtgctgttaggattaatgggaattagcagttgtagaaaggacttgcaggtgaccttgttcctaaattaccttaagggaactcagtattcgtacttgaggagtttattcatttgacatctatcctgataaagagttgtagttatttgcatttaagcatattaactctatgctatcaaatataatgaaaaacaattacactatgttggtctgcctcctttgtattaatcctattcagactgtctaatgaagactttttctttgaaatgtgcattcttaatatgtaaaataatttataaccagatacaactatgctgtcaattcaaatgtatattagataaagcacgagtggaaaagaagtcttagtgacagcaaaacactaaaatatgtttttaagttaaaggggtccttgaaagttataaaaacctattttttggcttgctagcattttttctccagtttttcccccaaaattttgtctggtggcaattccctttaaaaaataattttacttttattagactttccataaacaagatattcttcaggtaagtgtgtataataaatcaaaagttataaacattttctctggaatctttctagcatccttatctaaatcagcctgcacccaagaaatgggaaagtaataagcagacctaagggatttacgcatgcaaataggaattcagttgttcattaaaattattgtactaagatttgaaagataaactgtggttgcctctatggttagagatgtatctcttctagatgcattttattaaatgccatttttccttagcacttttaatgtttagtgtagccaaattctaaccactgactaaatagacttctcttccagctcgttaagtctggccagttcagttatatgaaactagaaatgaaattagagagagttggtgagcgagaaaaccgtggctgtgtggtggctagaccagagcacattttgcacgaatgccatcctttgtgtagactctcttttgtcccatttccccaaaaaagtgtgcataatttttttgttttgggtttttagaaaattatcaagtttactatgggtctagaacactatacctatgaacagtaaattccagtagacttcaagcttgtatcactgttcctagattcccacatttggtttttgattgctcgtgttgcaactcatcatctgtaagcatttggctataataagagattttgctcatgacgctttctgacaacttgaatagatacggtattgtagctatgtctgtaatggcaaagtaaaatttgaaaaatatacaacatttaaattgtatgttacaaactagataaaaccagataccgaaagtcattcatttcatcaacccaatgtgtaaatgaaggactatgcattaatggggaaaatatagctttggaaataataaatttagtgttatccacatttcttaagtttaaaacaattgtatttgatgaacgaattcctctaccgccccacactcctcctgccatagatgcctttaagctttattaatttctgtgtaaatgtgttaaagagaaatcttttcactctttttttgtcctttgtttggcttctttttacctgcacgcgttaattaagcgatagtataaatgaggagtgagaatttgtggtctttttgttcactgaaataatggttgatctctttagcttttgtccgatttatggctttccttttttttcagctaaaaatctgtaactagcaggttaagcataatgtaggttatagtcactgtggtaagagtgaaatcaacaactctcttattccttccttgacgaatcctctttggtgttctctgatggcatatatttgaaggagaaagtaaaagctgggggaaaatgatactagagactctctaaataggtaatatatacaggtgcacatatatacacccaaatacaatcacagttttgaacagaaatatttgaactgaaatatttagtccaaatctactgtcattctgttcaggaggaaataaaaactctgaaatctgtatttcttatcactctcagagacacagaaccaaatgaatcttttgagtgcaagtacatcttgcgtacaaaagactaaaagttctgttgatacaattcttttttttttttttttttttttttgagacagggtgttgctctgtcacatcatagttcacggcaaccttgaactcctggactcaagcgatcctcctacctcagcctcctgagtagcagggactataggtgtgcatccccaagtctgactaattattttttaattttttgtagacacggggtctcacaatgttgcccaggctggtcacaacatgatacaattctgagagagagttagcatctatttgattcatcttaatcagcaggttctgtacacccagccccagggttcaaagtgagaaagatggcaaagttggttctggtttgacttctgtcctttctggattcatctcctgtcaccactgaaaaaaaaccaaagaggaaaggattgtttttagatgcttgtgcttgtccagaagtggtggattgaagctgaagctctcttcctgaccatcaggttccctcattttgtttcacctcaagctctggcctgctcctgtgtgttacttgcacagcagctgtctacttgaaagtcttaaagttattagcagtttctctcctttcttttacctcactgtaattttatttcttaatttagaattgaaagtatatattatccatctgacatgtgtgcatggagcttggagaaatagaagatgcatttctcttcatgaaacgtttgtaatttatttgtagaaacaagacttactgatataaaaaatttggaaagcatttgtgagagcatcgaatatcaggtgcagtgtgagttgcttattaaactaaagaacaaccctagcctggaggatgttagtgcattttctcaaggcagagatgccctgagacttgtggctggctttgaagtcaactccctgtgaccttggctgatggacattcccaggtctggcttcgacattttagtctgtgacatggcaaagtaaaatcattttgtctcgattttccacaggtcttaagaaaatgtggaaaaattcatatattcaaagatatattcaaacagtgctctcagtttgttggagaagctgtttaagttcacattgaccacagcgacattatactgaacctgtcttagctttaaaattttcagtctttatgaaagataaatcagtgttttgattttacagttacaattttacagttacagttttgattttacattacaaaaatcaaactgaattatctaaaaaatgagatttttgtttatgttttcagtggcttttaggaaaaacttaatatattatgattaagtctttcataggctatggttgcctttttgaagaaacgtcatgtttttaacacaacagagcaaccgtggatacataggtatgtgttcattgaatctttactatagaaatggagtgtggttacttaacactttaaagacttgtcttgacgccacattctttagatttctgatatttcatcatgctcattgatgtaattttactgtagctctcatgttttctcctactttgttaaacagcatttcctggaatttggaatgccatttttcttggcacttcagtgggcagcttatgcactcaaggcatcacctaagtaccagcaacacattcttgactgaataatgatgtatgtggaatgttactttttttgccttataaatggatagcaatttacacagctgtggatgtgggatgtttcaatcccagaccatgttgtaagaaaaattgaatgacagtgagcaaaacagcagtaattataaaactaattactaaatgctgatgatgcccataggctttgcataactaaaattagaaaaggaaattgctttcggcttcagagaggcaacatgctagttatttcactgtttcagtcaaaatggagggtagtatataaagttcaatcaggaaaatacatgcatacgtatatatctatagatttgcatatacatatatttttctatgttgaaatgttattcactctatattacaattttatttatagaacttaatgcacaggtatttacataaagaagataagtatattaaaatatttgaatgcagtatataaactatgcatttttgcatatgctataattataacattaaaatgaatatatttacaatatatttatatatatttagtttttctcatgtacattttcacaagcaaaatgtatacatttccgcttttgcataaagaacccaatcttaggaattcgtagcacatttttcaaaaagaattatttaaaaaattaaaacattgattggctcagaaaaaatgaactaacgtgttttgggaaggcaaatgattgataaattcaaagtctatgaggcatacctttgttcatgctcagtttggagctaagaaatacatgacattaactccaaagaagtcactaagatcgtaaacatattacctgcagaccccagacagttataggattataaatgttagagctgatattgataatcttcaaataggaagtactaggataatgaattctgttaatatgcatgtaaatggaaaatgatttaacaagttttaaaatgcggtcatttttattgaaagcatatccttgttctttacaattagttggtttctatttccattctctctgtagtcccacagacaaatgttgtaaactcttctgaataaactattgctggttatgtttaagtttcagattaagtagatcatggatcaggaagatgaatcattgttgatacagaggaaaaatacctatttacaaatttgagtagtttgaatgacctagtataatgttttatttaattttctgctgcatgttgttttagaagtcttaagaaattaaaatggcaaaagacgatactgtctgtagatgtctattattgaaatgaaaaccaagtttaattgaatcaaggctgtaaggaaattcttcttgtaacttttacctagtggggcagtacaatgagttagttcttcccatttgtggtagtgaatttagtaattagttcttttaccaaggcaaatggtctaataatggaggaataaatcacagaatgccatataaaatgaatatggaaagtcttgcgccgtgtggaatgtctggtaatttagtcagctgaaactaatatgtgtacaagttgaggcaaattctccacttctgcaagtatacaaggtactaagagttaaaacaaatcactgctgcttatcagttgtccttcacatttgaggttatgtcagtcataaaaaataagtatgtgatcaagacttcaacaggcttcgagtgagctaaaatgaaaccagcatgtttatgtcattttttcaatggcacatatttggcctcacatttattagcttccaatttgttctcctgggggtctgaggggagaggaggtaagaggacttctcagtgtattagtgctgagaaacattggttttcttttagttaagtgataaaggggagtttcaggggaaaaagggatgagcaagtggaagagaggtgtgtacttatagaaaaccacttcatccaacagataattactgaggatttaatatgtgccaggcttacaaacatcttgaaaggaaacaaacttggcactaagtgatgtttgaattcaaaattttgttatttaatctgtgaatcaaattttagtagaagacagataacaaaacagttttttcaaggatctttattcaaaattcattgtcatttgactcattaaggcaactcacagtggcctgtggggtactgtttttatccatcagtaccaggaagaaagccttgctcacagacaagatcattttctacaaattttctgtcatgtttcaccttggtaatctccatctcttgtgtgcaaaaagaaacaatttattttcaacacttgagggatatagaacatctgactgctgtcataacctatcgtttttaacataaacattatagctgcatttgccttgaaatatttgcccattattgcataaatctgagccatgtacagaagtgtcaccttgtgctctccagcatcaaaatggagacctattgcctagaaagtgcaatttgctcccttcacatacatttacttcaacaaaattagaaatagtttttttttcataattgagttaaacagtgcagtaaccgaagaaaaacttatgagagaatgcactgcttttaaccataggagtagaacccctcaaatgtggctaagggcctactatattttcctttatcaaaagatggttgattgcttaatggtcaaagcactactaaatagcctattccactttactagagaaaatgtgctttacatcagttgcacaatgtaattctttctattatgttggtggaattgttttaccttgcatggaaggatgcatgtaagagagaggatgatttgataatcttttgcaatatataagatttctaaaatatattattcataggattctgttagttcacttacaaagctggagccctttgcagtgtactctgatcattcacttacagaatgccatagtttactactcaacatatctggtttaaaaccaaaataaatgtttatattaagctaattcctggctccattttgggtccctactcttatttttctttttctttttaatatatttcaattttatatttcatgtacctctctaagctgtattaaataataattggactctttgtctaatttcattacatgaaataaagccttctttttgtgttgatagccttgtctgtgaacgtttaattcatcatcaagctaaaataaacatttactgtaacatatattattttgtatttttcttctggttagtactcttctttaataaactctgattcactgttggagaagccaaaggaacatttgttgtttcccatgctctgctttttcctctcttgagagaccacatcgctccctttcattattgccattattttgaactgttttacagctggttcctagtctgacatcattttgtaatctttaaaatgtagtttttaagcacctcttagggacttaatatttctactctgttacagccttttaatttactgatcagctgccattttaaaagttttttctgtaggtttggcctctgcagccttctttgtgttctttttcatttttatactaataattacaacacttcccaattaattgccatttgtgaatataattgatgtgtttcctccctctccagaccactaatgaagatgttaaataagtcttagcatgaggctaacctcagcagaattcccttggaccactggcatattagagtttaccatagctctatttattttctcttcttttaagagtgcttctggttgagacattttaattcattttctagtatttcacaatagtgaagctctgcatgaagtgtctgtctagatatactatgcctggtgaactctgattttctgaaaactaaggctattgatttacttaggtgtcctagaatcttagaagcattttttgcattctagacagtgaaaacaaaaagcttttgtaaatgtaatgtgtgagatattatcactataagataaattcaactgattttttcttgttttgcagtattggcacaagggagcgcatcaaaggtgtttaacacaaactatgtagctgtcttagaagagagcatgcctccatttcagcccaacaatattgggtccactttctctatgatcagaatattacaaagggagtggagaataatttatatcagaggttctgtgacggaatgaaatggagcccttttgaagtatgatctctgaaagcacagcatgaagctcaaataaagtgaaggacattttgctattacaagtaatgtccttaataatcttgttagtctagtctccctctgtacgagacaaatggaacattattggcttatgggctgtagtaaataatttagtttccaatattcaggctgctttgacagtaaattaaaatgacatgaaaggagcttgttgaataaagaaagtatccaatcaaatttaattggcatgactaaggcagtagaaatatgttttataattaaaccatgttgtcttggagctttataagcatgtatgaatcaaaatgtcaaaaattattctttgatactgtgcatttaaaactttgcatggtgaatagtttccttaaacaagcttctagacatgcatattgatgtaacatgaaaatagtttcatgttttaaataataagtgataaacttacttcttcatttgtaaacccttgtaagtagcaattctgataacaggccacttagaagtctcccttataaaaattttgttttccaactgatatactaataattcagagaaggttatgatttttattttggctatcttatgattcttcagtgctcaaccttttggtgaagaaaaataagtcgcaaactcactgagcagaataaagaatagagaaagaatagtattgagaataaaaaacaaataatgcaagatgtattttggtttatagttcccttctcaaattcaagatgaattagattttctacatttgacagtagacgtgtcaagtacccttctgctataaaagtcaggaagccatgggaatttcagatttttgtatgaccacctgtcccgttttttcccttccctgaaagtggtacataagtaagtgcccatttgtaataaaatttctaatgacagtctttccacaacttagctggaaaatatatggtggtgtctgagtctgcagaggttgcttataaaaacagaaatgagcttagtgaatcatttttcattcatagccttttcaaatgtcttagtcagagtaagctaaagattagagaaggtaagcgagaagagaggttcagatgcgtcaacattattcaaactatgaagatcatatgtggctttttcttagagatttgggtattattattttctaatctcttgatagcttttcagttcagggaagatttttcatgaatagtcactctcttttcttgattagacccaaatgcaatagcttcttcagagataatatggtttgtgcttacattgctccaagataaatctaagacaatatgctacaaattcattgtattgctcttcatgaagtgctatagcattagatgatgtggaaatgcataaaatattttctttgagtaaaaaatgttaaaaacgagtggcccttaaagtctgccctctctacagtctatatttgaaggcttttaaacctaaagtacatttttattaaaattctggcctaggaacaaattaaggggactgttttttaaaaatcattttttccttaatgtttatccagtaacctccatatgcgtgcaagttacagagaaaggttaagttttaattgttttctgttgtttggtttttattttaaatatatatctagcaaaaattattactaacataatattttatgtaccattgtgacctgaaaggataaaaataaatgaataactttataatggaagcagaaaagcctcatcagagaaagtttctggagagaataatgcaaactgggatatctatctctttacatataatcactatatctgagaatgccattctgtcttgttaatcctaagtaatgtatatcaagacttttttttttgaatacctactccagtggttctcacacttcagcatgcatcagaatcatctggaggtcttgataaaacattgctagacccctcttccagcatttctgattcagtaagtctatggtggggtccaataatttgcattttatctagttcccaggtgatactgctgctgctggggggaaacactctgagaaccattcactcatattatcaacagccaattattaatctcctcctgtgggctaagaacttgtctgtgtctgctgcctggatgctgaaggtctgttccagggaaagctagcacagaacatagacatttaagaagaacaaagatgctacctttggcattggcctagagcaccatggcagttcatggcaaaacacataagccagctctaccaattaaaaaaaaaaaagtacaagctgaaggctgaaggatgagtaagagcttcccaggagaaatggaaggaggaaaaacagatattttggtgacaatttgtatttttatttagtgtcagtattagtctgaaacatcattaatgttctctaaagggaaaaattactattgcttttaaaactttgactgaccaattgatgtttagaaaggaataaaataatgtgaaagcttctttttctagaaggcttcccagcccaactcatttcagttctgtgcacatagctttgtttgatttcctatacatgttgggtgtcttttgcactaggcctactatttggaaaatctaactttcaattttattgatatctacatttgttaaaaaaaaaaaaaactatgcaccaaagcacaatattaggattttcaccatttttggttggttcccattgttataatttgcattttacttcccagttacatggagacttatatcttctacttcttccaagcttatagagaatacccaataaatgttttagaaattaaaaaattattttctgtttttaagtagttacttaattgaattgcatttatttactttatcagtcttttgagttgatctagctctgaaagcagttgggcatttggaactatatgatgcttctaggaataaagattttgagatgatagtggtacataaacacttgtggcttctgctatcttggaccttatatcttatggatgtaatgtaagttaaaaaaaaaaaacatatttatctgcaaatttttttggtagcttgctttcttttaattttgtctcctacaaactctaaaatatattattttcattttacagatgaaacaggccaagacaggctaaacatgaggctaaatggcctctaagtggtacagtcagtattataatactcttttgaccggttctctactctttcttctataccactttaccagagcctttaattatttatgcttgcccaacctggaatgccaaaagctaaaaccccaactcagcaaggcatgagtaaaggccaccccataggtgtcaacttgagtggtcgtgccttccttgcattgttttcttctgaccttgtctttgcacttgattttgggacaagtggttttcctctaggccagtagttttaaacttcttttcttgtttagtctgataatattttatcttgacaacaaatacacatacaaacaaatacacagaaggctatttgaaaaccatagctctaggccttggttcctcaccctggcagttctcctgatgtagctgaaggcttttatgggaaggatatagactccttttcataaaagcaggtggtatgagtggggctatagatgatacatttttaaaatatgattaaaatatatttttagtcatattaaaatcatatatagatgccctagttataccacctgattcaaaacattcattgaatatctgttagacagttgtgatgatcaacctcattggagaataataataactactactactgagtatttctgtgtgccaggttctattaagtgcacttcatggattatctcatctaatcctcacaatacagaattaaccagttagaagaaccacaattcaaacccagataatctatctccagatccaaagcccttaacttatatgacgtagggttctgtcctaacttctctcttctcccctcaatcagataggtgcttcctggttctgaaatagggggtatctgttgacaagatattagattcctttaaagtagcctattaaaaagtaggttatttttaaatgattgataatacatatttataccaggagtaaattaccagataggaatatgaaatggatatgctctatccaccctgttattcacaagaaatattctcaagtacaatagtaagaagaagttccaaaccagatttaacatttcacagagttaaacacactgtgttgaggacctattacagtttactctaatacatgtttgggttgtctgtcaaacatttcctgacactgtattagtgagaaagtccaaaactatctcatactatggtgaattaaaaaaaatagttagacgagtcacaactttaagtgttacaatgtacaatatcaataccaaatcatattttaattttttgttagcaataggtgttttttttttttttagctggctcaccaacttccatgatccttaaaaacaaagtcttgctttttagttgctgctttttctcccttcaacaactttatagttggcagtgaggacatggatatggaagtcacctgacttgaggtcagagcttggctttgccagtaaccagctgtgtaacctcgggtaagtttatgatatgcctcgagcctcaatttccgtctctgtgtcactgagactgttagcgcccacctcataaggtcatggtgcagacagcatgagataagctgagtgggagcagcagcccagtgcccagtcctgttaagaactaagtgctcggccaggtgcggtggctcacgcctctaatcccagcactttgggaggccgaggcgggcggatcacgaggtcaggagatccagaccatcctggctaacacggtgaaaccccgtctctactaaaaatataaaaaattagccgggcatggtggcgggcacgtgtagtcccagctacttgggaggctgaggcaggagaatggcgtgaaccccgggggacggagcctgcagtgagccgagatcgcgccactgcactccagcctgggcaacagcgagacttcatctcaaaaaaaaaaaaaaaaaaaagaagaactaagtgctcacttgttcctttcctatcttcagagctttgattctaattagaagagtatctactttgaagttggtctgacaaagttctagtctttggaagagaatgtgttgttcctaatctaagctttcctaatgaaatagtaggcaggccgggcatggtggctcaggtctgtaatcccagcactctgggagcccaaggcgggtggatcacctgaggatcaggagttcgagaccaggctggccaacatggtgaaacctcatctctattaaaaatacaaaaaaaaaaaaaaaaaaaaaaaaaaaagctgggcatggtggtgggtgcctgtaatcccagctacttgggaggctgaggcaggagaattgcttgaacctgggaggcagatgttgcagtaagccaagaccatgttattgcgctcccacctgggtgacagagcaataccctgtttcaacaaacaaacaaacaaacaaaaaagagaaagaaagaaagaaaaagagatagtaggcaaagacagaacttcctagcactgtatttgtgcaaacttccttacattctaaagtagaatgtactttaaaagagagtactttaatgtacattctatcttagaatatacattctaaagtactctccccattattacctgtgttaatgtgatattatcttttgcatttaattttaatttttttagcattgtaaataccatttcagataaaagattttctgattttgactctttggggaaaccagctaagcctttcagtacctcaaatagctgattatgaatagacggtattgccttttgttttacattactttttttctgatgaaattttttagaaatattcagaattgcctttttcctttacttgaatatgaggagaaggctttgggctgattttgaaatagagactggttgccttaaaaactgccacagtggaagccctttatgatcctggcggtgcatgtgcaaggacagcggggcattgtgcattcgtgtaggcttttcttgtaaattcttgctactttttggtaaaattcactacaagttggtcaaatgaccacactttattgtgtatttgtcacaatttccacataaaaagtcatattcagattggaaattaagcagtttaacttcaaacataaccttccataatttgttttaagaagtcctcatgtcgaaaagatagaattactttaaattaaaacctatttgctaatagcacttttttattttttagaaatcatccttagtagtgaagtgtgggttacaagatgaaaactatagagaatatacattcaccctagtctttgctctcagattcattatagacctggaaagacaagcaccccaaacccaggagggcagtgtttgcagaatccagagtgtttaaaaagtgaattctattttcacggtatagtttagctaactagacaacttctgtcatggcaaaattgtgatgaaggctaagttcaatccatgcagggcaagatgcatgagctacaatgtgtgaaaaatgactgcaagtgatagctttttactgaagcaaattcacagtgatacaactgcttaccttttcacagtgacacttattagaacttatgagaatcataacagataatctcttcctaaaggcaacataactttgtatcagctgcaggattgtgtatgttgctggcaaggtctgtagtctgtcttgtttagtctggacactgccacgttggctgtcataaaaacaatttaaaattcttaccggtatgttaaacagcctccaattcttttcatgattcataattttggatgttctaatctttagcagagagatttaaaattgattatgaaatgtatatttttattccagtgttcacttgaaatacacaagtttttcacttcttctaattccccattcagtattttgcatggttaaagtatgagtgtaaaaatagtagattttttaatgcttttgtataggctcaggagagtctttcttgctatatctagctggaaaggtaatgaactgtaaaatatgttgaaatgattggagattaaaaatctctggtgtgtagtgacagtgcaattatattccacagtaaaggtttcatgtattaagagtaataaataaaacttatttttcccactgtgattggttgtcaccatcataatgatagctttgaccttcttcctcttcaaatgtcgttagtctgtgaccaagcagtcaggctacagcaagatgctgtgaaaacctaagtttgaagtcagatttcaataaaacaattcttacaaaaccacagccgtgaaaatctgagagcacagtagatgacttttggaattctgcaaattgtgttgctttttcagtgtggcatacatactttcttcatgttattctttgactcctgtttcaggagttgggttatgtttagaattgggcttaaagtattgactgtatttaaacatataccatggaagtaaattgaccctactagcttgcagtccctccaagtcaggctcaaattgctgactgacatgtctgaggaaataagttaaataaaaatttaaatctttatagagactgttaaaattttcgaagattagaacagtactcatttttattgagtaagtagggcaggggatttaagattatgtaaacactacttattcttactttttgccttttttccaaagcgaagtcaatagtcaaaattatttcaaagagtcaaactgaagaacatagtattcttcagttggtgctcatccactttactccattttaattcccgtcccccccacctttttttttttttctttcctaacagtctcatctgaaatgtggatgtcatggaatgccttcagtgcaagactcctgaatagcactgggccatatttattcattagaattatgtgccattttgtctccctttcctgttaagcctcatttgtctgtctaaaaggtcaaaggagcagctgcctctggggctgacctctatgcacctctattgttttgctctttcaaggatactaactctttccttcttcctggggacctgcaggattgtcttttcaaagcatttactctttcttaggtcagggagcaagaaggagaaccgcttacatgttcctgtaatccctgccgctttacagttcagttttgtcatcaattgccatctggatgaattgatgctgcgttttaatgatctcacagttcacaagtgaaatcagcaaataatggatacatttgtaccactatttgaaaaccttgcgtttatgctttttgaatgcttactacactgggtaactgcatcaaactcagtccctctattgtaacgcgtttggaagcaaatctgtcatacacacacacacacacacacacacacacacccctacatacacatataaaattgttactgttcgatccccacttttaataagaatgggagtttggcagagcatttgctacaaacaagtggccacttactccaaatttctgtgaacccaaataatcaataagaaactcctttactttacaggaactttgcagttacatcggggtaggtagataatgagagtgaagcattgaaatgtgcctaaataacatgctgttacaagccttatgatagatttgtgtttgacttaacagcttttggaacctaataaaaagaacttaattgacaatttcttgaaattgctaagaaaacctagtgatgttggtagggtataataaggagtttctcattgctgtcttcaagattgagcctacacatacaaaaaaaaagaaggaaaaagaggatttatctctgtggtaactctaagtaattgatatacagacaaggtttggttccaatttgccagcaataaagttgtaatagggttttctctgcaattttagccttaatgtgctcattccaaagagcggtatttttccaagcgaacaaataacatcagtaaagcttacgatcagtaatagccccacactgatgctcgcattaaacttgttaaatcaattcgctagacactttctaaagtggactgtctgtttactttgacttgcaccctatgtggaggatccatcagttatatttatttgaatgatctttacattcaaaattggtaattattcatgcttgattgtggttatgaatgatcctctttttttccttcctcttttgttttacggttgctcatttttcagcctttggtgtttgaagtataggaatgtttgaagtataggaatgagaccaactacttgagtagggttattttttcctctccaaaaattcatgtgcatacttggttgcataaataccatggataatatcttttataataacctacccttattcagaaggtcttgttactcttgaaacaaccaaacaaatgcacaaatagatgtatttatacttctcaaaaggggtataaattctaactgtattaccaaaggtaaaatacagtatatattgggcatggaaaatgttggaccagaaacagatagctggtgttctagaaagcattttttggaggtaggcaatctactaaccctgctcatttttcattggaacaagctaagcctgctactgcatgctgccttttgtcagtaaacacaaagagaaatctgaagccatcaatctcgcttatcagtactactcagtgtgattcttttcctagccgttttcctttttcttttcttatacagaacttcatttttcccagtgtcctttcactttgtctgtgaatgagttaaggggtcaggtgggtaaaacaaaattaatgctatgtatttgcagaattgtgtattgcttagggttgggtgggtgtacctccatatacagaagtcaaatgtggctaagagggcattttctgaataaactgagttgcctggtgatgtctgcactgggtatgattatagccactgtgttgctttctgtggctggagcccagtgaatgaaaaggcaattcctctgaaatcattccaactttttatgtgtcgttcatctgcgtccttaatccaactgtttactttttatacttatctatatttaatattttttcttctactggaagtgaggatagcatacttttaaatcaggtatgttacataacaaaaacattatctcagaacaaatatgaaaaaaatctttataattcaacaaatagccttaaaaggtattaaatcacaaaagcattatgtccttgcttcaatttcatattattgtaataatgttttatttgatcacatggaatcacagttctgtgaagtagtctagtaccattatagggctttagcttgcattctaaattgaaattttaaaattttcctctgctttctcttttttttagaggggacctggcccaatttatttcagaccttggtgttgaagcacgttgcaattcgttgtctacgtttacttctttattcatgccccagattcataattaaagagataagtttattacttgttgggtattagaacctttcgtgggtgtttgcgtgtgtgtgtgtctgtgtgtgtgtgtgtgtgtgtgtgtgtgtgtgtgtaataaacccattatgttaggatccacttctgtgtttttttaaaaactcatgacgagctattgtgatttatctagtgactatgagcaatttgctcatccctgtgaggtatatgaaaactttcatggaatcaggtacagcccataggactgcatttctaagatacccaattttatttcctgtgagtctgcaagttactcagatatagctttggttcattatagaatgatactcaaattaattagctgaatgaagactcaactcagggtagatgtcttctctaggtttgactggtttgtgtctattcatatgtgtgtctaagaaggcaactaaggtattgagtgactaccctgtgctagacagtgtagtaggtattcttatatatgttatcttaataatttaatatgcaaaataaccccatgatgtagtggttattcttttattggttattcttgattacattgtcttaaagtttattagagttgtgcaatcttcaccttacttttcattactattacatatgttatttgatttctgaaaatagttatctattttttttttaatttcagattcagggggtatatgtgcatgtttgttacatgggtatattgcatactggtggggattgggcttctagtgtacccatcacccaaatagtgaaaattgtacccaataggtaattgtgcaactcttgccccactcccaccctcccttcttttggagtccccagtctgtattatctatctttatgtttatatgtacccattgtttggctcctacttataagtgagaacatgctgtatttgactttatatttctgagttagttcaaaacaggataatggcctccagctccatccgtgttgctgcaaagggcatgatttcattcttttttatggccatgtagtaccatattttctttatccagtcaaccactgatggacagttaggttcgttccatgactttgctattgggaatagtgctgcgatgaacataagtggaaatgtctttcttatataatgatgtattattcttttggtagatacccagtagtggaattgccgggtcaaacggtagttctgttttcagtttttttgagaagtcttcatgctgttttccatagaggctgaactaatttacattctcaacagtgtataaatgttcccttttctccatgtccaatgatgtggttattgttttctttttttagagacaaggaaagtgaggcacagagtgattaaacaacttttctacttaaacacagctagtaactgaaggaaccagaattaaaactctcatctagtagattcccaagctagtgatttttatttagcacacgtcagtttttagggagtaaattactttcccattatgagaagcagctcctcacaactgatttcccaatggtaatcaagcttcctgggttccatttcctatgattgcccactctgccaattttcaccctgcttattactaccttatttatttttggtacttttctctcttgtgctcaaattatcatttttcctggttttatgccttccatgatgagtcacccattatgttccttaatggactttatgtcccccatatgtccttaaatataaacatgtccctggtttctgttactctggcatgccttgactgggtgatctcattctgttctgtggttttacccactacctaattattcatggcagttctgtacccctactttagatttctctctggagttctaagtcttgatgttcaactctattgtgcattttgcctcgatctgccataggcttctcaaattcaaaaggttggatgctgaactcagtatcatctaaaacccagttctcctcccatgttggctagctaagtagaagaaatcaccatccacccagctacccaaatataaactgggaagttaacctcacattctacttcttattcaagttggctagatcagctcttctccatcctcatcctctctgctttacttaaacctatcattattttctcatctgactgatgttgaagactgactggggtcctcgcatgcagtctctcctctctcctacccatcctcaattccaattttccatgtagcagcttccatagtcctccgtggccttctataacctagaatttatctgttttcccagccccatctgttaggatttctgtcctgtctgtcctaaacttatatcttaccttctggccttaacacacttctcgaagttcaaagagaatgctaccttctcttacctcttttgcactctattgagcaggatgacttgggtttccagtgtccactcagatactcaggtgaggtctcttgaactccccatcctcattcttaagacttggattagggggtccttcctttgtactctcctatcagcctgtgtacatttttattgcttatttacgtttcaccttcctcaagccttttatctccttatcctcaaagcctacggtagtgcctggcacagtaggtgctcattaagttaattatgtattgaagaatggcttaatgtttcaggagaatcactctttgaggcaaccagttataaaagccgtttataaagttatgtaatacaatagctatgaaaaatactaaaaggcagctaagcaaacattggggaaaaagcaaggaaggagcagactacagaatcagtcacatttttcattggccaaaattctagaggaattatcaaatatgaaatgactcgtaacttggttgaagttcttaaatgtcagaggtatgtatgaggaaaactcttaatcttgggtataagtcatagtgaaaatctatggaaatatatattcatggactatgtcaggagatgctataatatttctggaaacattggaggaatttgtaaaaaaaaaaactagttgcagactgacccagtcttacttcttttctcatttctggaaaagtattaaggatacgttggccaggaaaacttggaattggaaacaggccaaaagcttgtatgaataggaagtatgcttttccttgttcttgttcagtaatatgtttctttccaaccctagcatgtgatggctaacatagcaggtttggaaataaccctgttttgaaattgcttaaggcttgtctttactttgaaagtaatttggatagtatatgaacagaatgtttagataaattagtaatcagaagataccctgccagtgttgttcttaggtaattcttctaagcatggtgaaactttgtaaacatgtcagcatctgtaaaactattcactctcatttaatttgcaactcttctgcaaactaatatatagagaaatgaatgctcaatagctgtattttagtactaattataataattacgatatgaaccagaccaacccggactagagtatttataaatcctggactatttgagctggagagaccctgtgaaaccacttaaagtgtattttttttccaaggctcaattgccaagtgggctattagtttctttcttctccatgattatagtttttgtccttaactttggccagctctctcatccaatgttgggtagggtgactcagcctggtctcaccctgttatagataaacaccttcaaatgcagatttctgaagatggtatagccttagtcttggaaaaccaatttcacagttaaggtctttgtctcatccttccccagtgtcctgtgtgatgtctttcactagatgccagcaattagatggaatttattgaggattgatggtcgaccgattaacacaccaggagagagtctcgtatctatggtttacaaaggttcaggtcagtaaagtgggttattgttagttgtaaagaaaaaatgatgacctcaaagagagttgctctttaggctaaaaggatagctagaaattatttgtttatgtaaattcaagtatagagaggaataattgtctaaatttaaaattactcataaaaaaatttcctgttttgttagaataagaaccaatagattaccatggtcacttgtaggtttatattctaagtaacatacagcatttgtgtaaatattcataatttaggtaaagcctgaccaccaaagttgtagtttcgtgtaagagaaccggtgttaaaagtcataatagtttgtgtgtcacattatactttataatagatttcaatcccttaacaacaaaaacaataaaaccttatccattttgactatagaaattgatttcataagtgatgcatttaatcatagaaaaagtttctttctttcttttgagggagagcataaataaataatttccctcatttggattggattgtaattattttgattgattttgtttccataaattacaaatagtaataggacccaatttaaatctaagaaatggtgaattactagtaatttcactaattagattttaagatctaccccaagcattatcaattgcagtttgttcttaattttgtgatgaattagaatataatccagggagaccctttcaaaacagattgattttgtttttgctttacactggccgttataatgtttcattacaaaaacataaacctggacataaatatgctagaacttcctccccttcaacctgaatgtatatcttaactgtatttccttctgttgtaaacacaatataattttagacttacatattattaatagtttattacacaataattttggctctattttttccagcataatcttaatgtcaatattgttgacacactctgcattgttctttgaaagaataaatgaaatgtgaagcaaaaaagtatggaaagctagacctggatggctcttagcggtcattgagacatcatccccattttacagacaggagagcagacccctagaaggcaaggtgacaaagaggtctggaagcagacttgagttcataaatagatccctcttcagactgagtttcaaacattggcttgtggcttggatccacttagagttcctttcatatactcctggttagctgactttctttcccactgggcgccactcccagacatgattgttttcctggtagccccaatcctatctgtcccaaccctccttcttcctaacagatgatcttcttccttccatcgcctcccagaaactgatggtgccaggcatgaatgccattggcttcctgcttgcatgtctgtgggtatgtctgtttgcaccaacgcttacctcttttcctcaggcttaggggagtctcagctgacccttttctcttggtgccttcaccataataactccagggttctccaggccttgggctttattcctttaatgagtccctctttggtaatttccgttccctttctccctggacttaccctaccatagcatttaaaaagctctttagtccttgaaacagacctaaaatatggagatgctggtgaaatacctgtattcagtaagtctaaggagttgaatttattcaatttgactaaaagctgtatctacatacaagtgtgctgacgggattgctttttgttcaaatgaagaagaaagtgtgccataggagtagatcacttttgaaaatattaaatagtgtaaggtacatttaagttcctcaaaacatcttctgtgcattaccactgaatgtgactcttttccacaattcaccattaacaggtcactccagggaaagacagtttatgacaataaaagttactctcatttccatacccccaagaataactgtgcctttttgtcttttaatgtgtgttttcctattatattacaaaggagaagtgccacaatactatttcaagggtatattttatgccagtaatcataaagtaatcattttagattatacttggcttgatttcacttttgggtggtatgatagaaagattatatctcaagagatttaaccacattttatagaacttcctaaattcagcagaaatatgaggcttattttggctgacacttccggagagtagcacagcaaagtaattgagaacaataaacttaatattttatttttgctgctaaggtacttatgaaattaagaaagttaggctaggtgcagtggctcacacctttgtaatcccagcactttggcaggccgaggtgggcaaatcatttgaggtcaggagtttgagaccagcctgggcaacacgttaaacctccatatctactaaaaatatgaaaattagcccagtgtgttggcacacacctgtagtcccagctacttgggaggctgagatgggagaatcagattgcttgaacctgggcggtggaggttgcatcaaactgagatcacaccactgcactccaacctgggtgaaagaaagagtgagacactgtctataaaaaaaagttaaaatgcctgacttgatagtttgccaagttcttttaagggagtagtagcaatttaaagtagacgtagtgttatgttgtaggattagctttgtcctttccaaatgagtaaagctaatgtaggtggggctatggaaagctgaagaaaagaattctttagtgattcattagaattgtccatacattgatgtgaaatacatacagctaattgctttgatgttgtgagtattcataggacctaatctgatcacaagggcatgttgacttcatcttatgacatgcctgagtccttcatgggtcatcctcgtatttcctctttacctctcattataaatcttccaactaagtcttatttgaatggaggaaaatactcatttttatcataaatagctgtagctcttttgtttgtttgtttttgagatggagtctcgctctgtcaccaaggctggagtgcagtggcgtgatccctgctcactgcaagctccgcctcccgggttcacgccatcctcctgcctcagcctcccaagtagctgggactacaggcgcccgccaccatgcccagctaattttttgtatttttagtagagacgaggtttcaccatgttagccatgatggtctcgatctcctgacctcgtgatccgccctcctcggccttccaaagtgctgggattacaggcgtgagccactgcacctggccaaatagctgtagctctttatacttaggaaagaattgccttcactctggaatctgattttctatcagtttgctgagaatgttgccttttatcccccaggttcagggtttgagctttatggttcctagttctgtctcatcgaaacatcagctatgattttttatctccttccgtccattttatttttttttctctgtagaagactacaacaaaaagtgtcactgaccacccatttctaattttccagcttattagatgattcacaaactaaactaccaatcaaatccttggcttaccgatggaatagaaatatggtctttacttttatgatttcacttaaaatattttctaagtgcttctttttttattcctgatagctatttcttatacagataaaataaacaaaacataagcataaattataatcgcactcaatattcacagtaaccctgaaattcatattaaggaaaatgggtgataggcaatgctgaaaaatattttgagggggagacatattgtaagtcatattttaatagattttgttcattttatttttaaagggaagactcaaactgtaaagtggggaagaaagaataagtaagggcatgaacccttgtctatagacacagcatggtgcttgtgacagatgctgaaaatgccatctttagaatcagataaaaaccagtttgaccacaactatgtgtttattttaaaatatgaaaataaataataagcagcagcagcatcttttttttttttttgagagagcaacatcttaaccatgaaatcagatatgaatctgattgactcactcagtggggatatgagagccaaagaggaggaaacgaaatcacaggggagttgccctgaacagacattgggggctggatcaaatgggccaggtggtcggacacccaaaagcctattgcatgcagccggcattttgttggccctggcaacttcatagcgtgaccatcttacgtgtatataagtttttcccaatggctaatgtctgactttcacgtttctttatcccagccactgcttctcccaaaggagtaacgttacttctttgttatgagatgagattcttagatccttatgtttgtaccttgatagagtaaacttagatttttgaacatctggaaatgatttgttggtatatacttagatgagttaaacacatctctaaaaagaaagcctctctccctggtcaactttttcttctttgttttcctttcctttttttttttaagtttggccacagttcactttcgctcctgtcattctacaatagccattcaagtccaaccaagtcttacactggagttatgctaaagctcatcatgcacccgtacatttttatgcagcaggactcaaattaagtttttcttttcttccaagtagattgcctcttcagttttctgctgctactttttcaatcacctgggcttgaaatttgagaatcatcagcagcagatcatttgctataacatctaatctttcaactggtatttttatctacactatatttcagaatttttttcttctgtttctcaccgataacagttttgtcctggtcttcctcatttcctgtctgtacaaaccaaatatcattcatctaatctctttaacctctctcttctgtccctcttacaatctgtataaacacttattgtagcttaataatcctaacagatttcttcttcttggtcattttttctttccagaaacctacaatgactatattttgcctgttgaatgaagtcagttcatgatacttacaaagataatcctatgtttatatagcctttcagagttttcaaaatattttgaaatcccctactcatttttgtcttcacagagtagaaagtactgtttctcttttaagcatgaagaaaacagtacagacacctgtcatcagcctgcttcatacctttgcatgtatttctcttcctgcttagaataccatctttcctttcttttgtttatttcaatgctagcaattcttcaacaacccatgtcaaataccacctcttcagtgaacgttttgtctgttgattctctgtagacagcattctttatccttgttcctgagttggtcatattttctcagtaaaatactgttttaaaagaatttaatcaaatggaatattttttaaagaattctcagctctttaagcttttatttaaaaaaaaaaagaactcattttccccttaatgtgactttttgggcacttgtataagctattctgattgtcaaattggtgttaggaattggagacaaaggttaaattagactctgctagacacttagaacaactccaatactttatggcaatgaacatccattgtacatatatttaaaagatagtaactcttcagaaaaacaattataccagtaaaaaatatatatgtatttatttttatatgtacactattcacagttttaatgttgcatttaaacattttcctcagtttaatattaaggggtagtattttgactcttttaggtattcagaatctaaacctgttaagtaactggcaagttaacatttcagatcatcataatacaaagtttgacataacaattttatgtgtcaaagtaattttcctccaatatacattttccatgtaagaagttaggtagttttatttctattttaatgtaatagagtttgaaattcacacatcattttatcctaaagcaatgtgaggaaatagaggtggtatctatcttattataggaattcttggctcttgggcttagcaatgatcatgaggagtctgtgcttgccttgagagcaaggggacagattttggaaatgtgcagtatttggtaaaggtaatgaagcaggaggtacagctcatctagagtttcaaataaactacctgctagtggcttgacagaaagaaaaagcattggctttaaaaataactctgtcctccactttgttttaagcctgatgtattccaaagatataagtagagaggacaatttttaacaagttgaagggaggcagcatttcttttagaaagcagcaggcatgcaaccctgatggtgttggtatttctgcctctgccttcatcattctagatctggtaattagaaactcagaatcccaggagaaacttttgcctaattttgtgttgattgtctcatagttaaattttaaagacacattgtgcatcgtaagccaagaaataagtgtaggcaatacagttctactttttgctccattgttttagatttccttcaagttctatacacaaccagatggattacatgcagaggatgataaagttgattgattgagcagcattccaggacctgcaaggtcatattttcaccttgattcattgaaattaggtagacacacaatttaagtgattttcaatcaaatcatgatgaaatgttaaaattgttaccttggatatatttaataatagtaaaacattgcctgttctcatttttccacaattattcatggcattttattacaatttttttaaattgtagattcatcaactcaacaagatggttcttttaatttataaaggaaatattccaagagttcttttaatttataaaagaaatattccaagaaaaccaaaatgaagaattttaattttcttaatgaaaataagagtggtttatttaaaaatgatttgaaaaagtaactgattttttaatgattgccattctaactggtgtgagatggtatctcattgtggttttgatttgcatttctctgatggccagtgatgatgagcattttttcatgtgtcttttggctgcataaatgtcttcttttgaggagtgtctgttcatatcctttgcccacttgttgatggggttgtttgtttttttcttgtaaatttgagtcctttgtagattctggatatttgccctttgtcagatgagtagatttcaaaaattttctcccattctataggttgcctgttcactctgatggtagtttcttttgctgtgcagaagctctttactttaattagatcccatttgtcaattttggcttttgttgccattgcttttggtgttttagacatgaagtccttgcccatgcctgtgtcctgaatggtattgcctaggttttcttctagagtttttatggttttaggtctaacatttaagtctttaatccatcttgaattaatttttgtataaggtgtaaggaagggatccagtttcagctttctacgtatggctaaccagttttctcagcaccatttattaaatagggaatcctttctccattgcttgtttttctcaggtttgtcaaagatcagatagttgtagatgtgtggcattatttctgaggcctctgttctgttctattggtctatatctctgttttggtaccagtaccacgctgttttggttactgtagccttgtagtatagtttgaagtcaggtagcgtgatgcctccagctttgttcttttggcttaggattgacttggcaatgcaggctcttttttggttccatatgaactttaaagtagtttttttccaattctgtgaagaaagtcattggtagcttgatggggatggcattgaatctataaattatcttgggtagtatggccattttcatgatactgattcttcctacccatgagcatggaatgttgttccatttgtttgtatcctcttttattttgttgagcagtggtttgtagttctccttgaagaggtccttcacatcccttgtaagttggattcctaggtattttattctctttgaagcaattgcaaatgaccatttgacccagccatcccattactgggtatatacccaaaggattataaatcatgctgctataaggacacatgcacacatatgtttattgcggcactattcacaatagcaaagacttggaaccagcccaaatgtccaacaatgatagactggattaagaaaatgtggcacatatgcaccatggaatactatgcggccataaaaaatgatgagttcatatcctttgtagagacatggatgaagctggataccatcattctcagcaaacgattgcaaggacaaaaaaccaaacaccgcatgttctcactcataggtgagaattgaacagtgagaacacatggacacaggaaggggaacatcacacactggggcctgttgtggggtagggggaggggggaaggatagcattaggagatatacctaatgtaaatgatgagttaatgggtgcagcacaccaacatagcacatgtatacatatgtaaaaaacctgcatgctgtgcacctatgccctaaaacttaaagtataataataaaaaaaagaaaaagtaactgatttgagaatgataatccagacagatgttttaaagaaaataaacccaaatgcttccatttaatattatgtactgtgatgttatttagattattaatagtctatactcatatgatttaactagattttattaggagaggtagatataatgagaagagttagtgtctgaatggtactagggatatttggggaagtggcttaaatctgtcttgaactccctctgctgagctgttgcttttttcttctccttctagcaaatcctttcacactataaatgtgaatgatagaaggtgatctacagatattcatttccttcctctccttttctgagccatcaggcccagtggcagcctgacctcttgcctcccacttcatcagggcagtcttggtctcctcacttggagagttcctcagagaccagggacctaaggcctccaactgcactttgtagcctggtccccacttccattattcttcctgagttcccagagtttctctccataagtttctctcagtaactggtcatatttcttgaggtaatatggaaaagagcctagcagaaaggcaggcacagagtgagtgagtgctgtttaagttctagctaccatcatcactactacctactgagaatactcttttcttctttggtagctttcttgaaacaaggtccctcgtgttaattcaaggcagctgctgtgatgaggagatactcatccaagcctagccccttggctagtaggggaaaggtagcaataaggacaatccctaactgggtaccagaattatcctaacacttcggacttctgaaactctgtcactgaactctgctctctggcatcacttcaaagaactatcaagtagacttaaaacatgggctttgacattacttttcagtttagtaatagtattaactgctctgtaaaattttctaaggagtcatattttcttcatcttttacaatatattttttctccctatggatttcacaatctctattatatgctaatggctttgaacttaaccttttctgtgatatttggtaagagcaatgcattacatttttttttcattttataacagcaaataaagtaaaagctaacatttgataaattaggctctgtcttatgggctgtacatgtgttcacttactgaattctcacaccagtactagcggggaagtactatttttctatacttgagaaaagtgaggtggagagattagtaattcacccaaggtaaattgtagagccagcatgcataagtcagcaatgtagatctggggcccaagcttgtgactactatattctgctactttctttgttacttttttacttgaaatatttaaatcaaccccttaaaaaaggaatctacgttggctttctgatagtctatcattagattaccttggaaatcactgtccatgatttcctttattagtggcactttaaagaaaattacattttagataatatatatttatataagaagtagagataggtatatattgtatacttacatatgtatatgcacttatttatatacttaaatatgtaatataaataaaaatatataaatacatatacacacacatttatttagactatactctaagataaattttgtgcttcagaagctaacattgcagaattgttataaaagtgtgatgtcctttggggaagtcattgcatttcccattcttgaagctcacttttaacttaatctgaaattaaagaggcctaactggctaaaacaatgtaaaggatgagtttaaatgcacaatttccttcctttttatatatgatagcagtgaaaggatgtgttttaatttgtggacctcccacctaggaccatttcaacagctttgaatacctgagaaaaatatcaactgctaagccaaaattatccttcttgtaggagactaaaatagaataattcagattgaagagagagctcatatctaggttccaagtctcacaccataacccatcaatgagaatccttacctctaagccaaagatgattatgccattttagatatggttgccattttactgcttcaggaacttacatagatgaagtaaaagcagtatttaaaaactaaatacaatttaattattgcctactgtatctgatactttactatattccttatgtacacttggttcaatcacctcattttacagatgagataagaaaactgaggctcatggagagtgattggatcaaggtcattcagctaatgcatggccaatataggtcttgaccctttatctctccatctgatgagcttgttaaagactccccaaggaaatctcaaatatttttatagagcactgttaatggaatcttgtatggctagtactctagccactacagatatttgtattcctatcctgggtattgtcaacagctcttattgatcagctttagagataaatatcaaaggtctgaatgcagaggactgttaggaaagttgctgccttaaaaaattctctctcattttctatccaaaagagacacatttggaatatctgacttagcaaggcaaagaattgtttgggatgggtaattgccagcttgacatttgttattatggctttgtcatttttaccctgtagtttatgaaatctgctattgtatattgcccaaaggcttttaaaaatcaatggttgcattttaaagcatatagaataaaataaattaaatgccacaattcacattgtataattttaagactttggggaagctgggcatatcaaggtcaggctattcttggggtattaagaatactagaagatattgcttccagctcattgtactttctatatattttatggtgtgaattttactacataaatgtacaaatgagaatatattaagtgaatatatacagatagaagatttttgaaatttaatgctgctgaggtagcagcaccagcatttaaggatcttgacttatgagaggactgtagacatctagtgtcctttctgtcatctcatcaaaatgtagaatagagaattaagaacagggaggagctgtgtttgcatgaattgaaagactttgtaggcactccaaatgcttatgaaatctcaaccatgaaattaagcttttttcccctatatgcctttataatataagccaatattcttcttcatgaaggtagaatagaatttattgacacatttttctggagcttgtctcactaaataaaaattttcaaaagaatttaagtttgaaacaatttaaaatattatctttttatatttaaatcactgactagattgtaaccaccttaaactgtattacagatttcctgaggtggggatctgcatgtgtaattgtttgaatccagcaaaacgtggagcccagcattgggcatgcagaggagtgctatcggcacatattgggatgaagtgagtcttggccactctgctcctacatagtgaagagccagtcgtactcactctagttcctctcagacttgtgaagaatttggcatctacttgtccatacaacaagtttcattttatctcctactgtatgcctaaggatgacataaaaattaaaaacataattactatattcttcttgatttttttttcagctgctaagtttcagaatggcctgtgataggggactttcccaaagaggtgtaggtcttatgtgaacttggccccaggtgatttaacctcccagtgaccttgtcattaaagccccttctcttgtccattggacaaggatgcccagtcccaggacagcatttctgctgcctttttgatctgaagtcttggagcctgctcttgttactggctgctttctctcttaatgaatacagacctgcttgatctcttccccagcttagactttttgactccttcctgtataaatttacgagatgctatctctccatagaagattttgtaaataaaactaatatagtaagacataattatgtaaaattatcaagtctttgaggtggcaggaccctttattctgtggtttctcatggttcctgttgtcttcattgccatacaattggccttgtctttgatgtttatttgctatggatttctttatttctcctttattgtatctcttttttttgcattcaaatgtaaccactcctctactggtttgcagatttgcttcatgtcactccatgaggaacttatcagtcagctatgatatgcctatcacttactgaacactgtgagaaagatgcccaaatatacttgacgtagcctctacctaagttcttaaggagcttaggaacttggagaagatgtttctgttttttccatgccagtctaggtcatggatactggaaaattgaaagctcatttgtatgtgtttaagctgaaggacgatgttgatattccctattgtaatattttctctgtgtgtttaccctccttgcttctctgagagagacagaggaggaaggcagtcctggaaagggcttttttgcctctctaattcacatcttctgtgccagctgtcattactgattcccttgaagtgaaaggtcatggcagactaatgctttcttgaagtatggccggtaaagctgcgatctagtgcatccacccttccatttgtttccccgatttccaggcaaggcttagaaatgcttagtaggactttgatacatagtcgcctaggaaacagtgacttattttatctaaaatattgtatcataaagtgtgtttcaaaataaaatttcaaataaattaaaatagaaatttcaaaataaaaatagctaaaatctgttaaataccctctgtcaggctttagtgaaaatcctttaccatattaaagtttaatccacacaacaccctcctaagttggtaccttgttgtcttcctcattttatagatgagaaagcagaggcatggagaagataaagatggatctatgtacttatctttcccaacacccaaatttagtaagtggcagagctgggatttgaactcaggtcagaataggtcttgaaccactatgaatcactctgttaatcacatgctcctttgagcaggaactaaacataggcatttagataaggaaatgtgcaaataaggtgacttgactttgaggggttaataattattgacctatatactatttagtagttttaggttcttggctcaaataattagttagggaaacaatgagaaaatgagaatacaagtcagggtgttaggaatgaattaagacaaagaggttccagctcacgagcatgacttcagatggcctctgatatacaaaacaatggctgccaatgccaaaaagctttattcgtattttcatgactttatcttaaggcattaatacctgttaaaatcccaaatgtcctaatagggaagcagggaggggggtatggggagggagggcaagaataaactgaaatactcattcaaccagtgatttacagaactatgcaaattacaaagtgacaactacctatactttaacagaggtgtcttggggtctgattctctggaagcagagcctaagatgggattcttgggcgggtgcagtagtgagggagtgctctcaagtgaaacctgtgagagaccgagggacacaggacagggcaggggaaggacagcctcagtctgatcccatggggagctctggagcagaaactctccatggaattaaggaaagcggttggccttttgtaccccagataagtcagtcattgacttattcccctaccaccctctccttcctagtatagcctcccagacatttccagaagacttggctcccagagactgagagtaatgcttgagagaaggatacagctgtaaacaattggcagccacactttcagcagctggggaatgagtgattgaccctataaaaggaaggggtagtagaaaggcaccccaacaccgtgtaccacaaaggacttccacaaaatactctgagagaatagaagaggaaagataaattccacctggtggtgatgatatttatagttattaacagtgtagtatgaataaggcatttgagttataaaggtgtgtgtgtgtaagagagagggagaaggagggagagagggaagaagagagcattaagtggaaaagggagagatggaagggacttcctacttcaaaattctgctctagtatttaaaaagcttaattacataggtttttagaattcaccagaagaggaatgaggaccattgataaggtggctagattacatgttttccctctggaagatcgtaattaaagaacagctttggttttcttttttgttttttaaaataactttgtggctttagcctgttaagcacatatcacaaccatgagttatttgacaggccatcctagaatggacgatgtcctgtctgcagatatctcaggtcagccagtttgagaagtgaacacctttctggatggatggcaggcagaagacagggatcactggaaataccaaataccctctaagtatagggctgaaaggaatgcctccccttcaccctctgaatgttccttgaaaatcaagtgacaaaaggaagattaataggataaaaagcatagaaatttatttgatcataattttagatgactatgggaacctttagaatgaagaccccaaaatacagagaaaccgtctgtttgtgtgcttaggttcaacaaagaagtatggacagtcatatagaaatacgactggataaaaagggtctgatctaaggctcatagattgaatggggaaacccagcaaggcctctctgttccgattcttcttggcctctctgtgcagcatttcttcctcctgggtataaggcagaactctctttggaatgagggtcttaagtcctacagtcaaacgggataggtcagagaatttctttatggccagttttcacacagaaaggcaaagggaaagagagtagtatttaggtctcatggctggcttcagggaaagggggttctggtttccatgactcaccttggggaagaaggattctgattcctgtggctagctgttggggagaaggagaggccagagacaagagagcaggaggtcagaaagagtcctttgcttctgaggctttcatttgggtattgttttcggagccccaggagaagcttcccaacagccttgtagataacatgcttaaaaaaggataataattccaccaatgctaataatgtagagatttggagcacaaatatttattaaaaaatacctgattttaaaaaattcctccctggtttgcttgctctaccatctggttccacacttactagagcagtattagcataattaaattagcacttttctatctcaccttcctctgttctggcatgtactgtaatatatccatttggggggacaatattgtttgacaagctatttataaaattaagttagttatattccttattaatgtaatctgaaataaaggatgggctcttgaatgatccttaatgactttttcaaagagaaagtagaaaaaaaaagatcaagctgattgttattactatgatattgttctgttttttcttttttccaaaacatagataaattaagtgactgtaaattttcaacaacaatgaataagctgatgaagatcaaggtgatgccttcaagtgctcatcaaattccaggcttggggccagcctccttgcgtagcacttgtaatcttttttctcctgccagaaatcatgtttctcaatcctgttttgctcagcatcttaggcaaatcatggcttgaattgtacacatgattttaatataatattcagcagtcttttcttaaagactcagtcgctgtacatttcttccacaaagaacaccaccttcttgatcacagtactcataattatagcagtgggatattcatgacctttgtctaaactacttagtttggctacagatttagtttctgaattagagtcataatcttaagtatctcttagaagggccagatgagaaatgaatgtttgcttcatttaattttttttgttttgagatggagcctcactctgtcacttaggctggagtgtagtagcatgatctcggctcactgcaacctctgcctcccagattcaagcaattctcttccctcagcctcccgagtggctgggactacaggtgtgcaccaccatgcccagctagcttctgtgtttttaatagagatggggtttcaccatgttggctaggctggtcttgaactcctgatctcaagtgatcctcctgcctcagcctcccaaagtgctgggattacagatgtgagccaccattcctggcctaattttataagcatttactttgtttcatcaaaatatcactggaattctggtagacaacacgttgcaagaagtgaatagtcttcctccaaagcagttactttgggagaaacaaaactctaccaaagggtagtgatactgacagttttgcttaaaaaagaatcgaaatctctttacaattttacaaagcagaattatgtcagctaaactgttgtcttgactaattcctccccttactttggcccagcatttccaatttacttcccactttctcgccaattaaattacttggtatattctttcaattgctgttgccacctgtggatctttctgcagtcctggtccctgacggtccatgtgtttgtgccattgacttcctgatctctaactccagtggctggtctgcacagtgtgtggcttgactcctctgggagcctttgactgtgtgggctgtcccctgactcccccgctcttccccagactcactgtctcccactggtttctggtgcaaatctcctctcttttaaatctcttggcactttcttccttttgttggttctgagttcatcctctgctggcctcccttaaacaggggcctctctcaacctttctctgtaggtctcttctgttctcagtccacacagggtaggagttaaaagctgtagaagtggaataaaatctaggtttgaatcctgactctgctctttataggctctatgacttggagaaaatttcagaggccccattttcttatctataaattggaagctataatatttattccatcttgaacaacctagagaattatgtgatttttttaaagtaaacattcatttctcatctggcccttctaagagatacttaagattatgactctgattcagaaactaaatctgtagtcaaaccaaatagtttagacaaaggtcatgaatatcccactgctatagtgctatagggcttgtatgtagaataaactcattaaaaatgatagatttggctttaatctctggataaacaattctgtattccctagattgtaactacctgaaggcaggggtacttgttttgttgtatctccaggaccggaataagtgcatggcatgtggtaagcagtcactcagtggttgctgaatgaatgtccaacaaaaaaactttcaatgaaatagtgactcccaaatctggttgactatactgatttctcatctaaattctagaccccaatttcctaactctttccctgtagttttatgatgttaaaatgtcagacaaattaaatttaacagaatgatttgcaaatcggacagccccctttccccaaaccagaagatgctgtttggagagacactacactgtggcatggccagagaggatttatggacagaaaaaaagaaagtgacacacaggaaacgcaagtgtggtacagaaacagcaggattggttacagctcagtgtttgccttatttgaatatggtttgaacagttggctgcctttggccaaaacacagtgattggtacaagagtaggttacagtctgtttacacagttacagttcactatgtacggagaaacatttaggctggacttagaatatgtaaggaggcagcattaggctaaattgaatttaacaccagacatctcaaggtaaacatgtccgtgaacatgctcttttcctagcctgtatctcctttcctattaatactaccatcaattaactgcctgccatcctaatttccctccccttttctctggcctcccatatctagctggcttccaagtcctaattatctttacaattggccgctacccgctgtttccatagaccctgcctcagttcagacccatccccttctcatatgcattattcttctcacttcataactagcctccttttagtcttgacttaaagcattacctaagctgatccaagcacaagctttataaaactcagagtcatctcagttgcataaatgatatagctaaacacccatactctgagggaaggttctcccagctggccaggaaatgagtttagagtttaggcaggctctggaatttaggcctcctgcttttcacacctaagcttcttccttggaccacagtgcctccccgtaaggaaatagatgccaggactctagcaacttttttaaagggctacatttttatataagaaaagttcaaggatcttttatcatttcattagttggagaagctaaaacaatgcacagaatttaagtcatagatgcacgatagtggcagtgcctatgcaagttctcaaatctgaatcatgagtttgctgcttttctcttgaccctttcttgcttctctgaatttacaaatgtgcatgtgagaaaacatgcttctctttaaagatccaagggtaagagagaaaataagaatccagataataaagtatagctacaaaagggagcccacttagtttggaaaaaccattactgtatcagaatgatgtatctgcaagtgacttgcatgaacatattttatgtgcccaccagcatgttttttgtggttccctgcagcagatactgctcttttattactcgttagccacttaaaatccagcccaattttaacagtgctaaaagagcaagaaaatttattttaaagaaaaaggctacattcttctaaactggagtcataatattaatacttaaaatgcatggcaacatgctgggaaaatgggatagttatttagatatattataaaatgtagcccaccactttgatgtgattcactactatttcaccaaaccaatttaacagtaccctgtagagagggaatagtgcaattaaaattagtgacagagattttcacatgcatagatctaaatcagggtaggttgataatgaattaagtaattttgcttccttgtgaagtcacatccataatagattcatccaggatggaattcatgtttaaaggacctgtctactcacagtattctgactcaattgacaatattcctggttgttttccttcttttcttttttgctttttcagtttggctttgatgacagaatttaaagtggatagtcataataaattagtataatctgactatttgatctgtttcagcaaaggccaactcttttcaaaacataatttcacaaatctaatttttaagaaatcaaagccacacaactatatgtgagtccttagatatgataaatatatgctctataactttttggtgtgagagcacacaataaagttattcacatattcccagtacttagtttcatatgaaaacaccaagggtacctacattggtttgaccctactggggtactctatattgatacttacagtttcatgctttctgttctgagatgaactgtgtctgcaacagttggtagcacctacacactgtgtgcatgaccacatcaccattagatcttcggttatgttagtcatttctacatcgaaagtagggttaatttgacctgagaaagttgataaagagctatggatatactatttctgtgacttgcaaaaagtgttaaacgtacttacaaggagaacacgggagtagtgaggatgggaatgaatgcagttaacacagtaataagaaggaagaaattactctttgttcactgtggccatctgcaaggtttgtgtagtatctcttgtagatcttatctgaaattggtaaccttctgccataccagaaggaaatgcaaaatcaaccatttgttctagtcctcccatctccctattatgaacaataatatttatttttaataatggtgtcccagttttaatgaagtaatttttttaaaaaactcatgaatttcaaagccacagaagtgttgattctgggataaatcccaagtttaccacttcctaactctgagatcctaaataagttacttctttttttttccctgagcttcatttagttccttcctttgtaaaatgagtgtaataatggcaattatttcacaggattattgtgaggatcaaagataatgaacatatcatacttggcatatagaaggtaatttataaattattataaatagaaattatgattattttctcatgctttaagataaatgatactatgacagcagaatgtctgtaaacatatattcttctcatagaaaattttgtttcttctaaggtagaattctgctttctgagggaatgattggtagattgtaaaatttcttgatttgttgattcactcaccaaacactcatagagtgcctactatgtgcctactatgtaaacataacaaagccatacctccaccagagcttacattctagcagagagaaatagacaaatgcacatgtaatgccatgataaatgctgcaaagaaaaatcaagcagtatagggtgacagagagtaataggggatgatattttagatagtgttccaagtatttttctcttacaaagaaaatccagaaacacaaaaataccagccattaacaaaagaaagacccttatttctattttatagagttgcttgattcccagcagatatgctcaagtgtggaggcagtgtggtcaaatggaggatacatgggtgttgacaagcaagaagtctttctagtcccagctctggcactgattaactggctaccatatgcagttcactgtatctgagtttcaattatttatttttcagaattatcaagtacttatttagtgcctgctgtatgctgggtacttggaacaggcaaatgaaccaaacaaaactctgctttcatggaacttaccttctgccagagaagaaagtcaacaaatacatatgtgatattagggaaagtgctataaaaatataaggggctaggtaaaaggaatagagtacaataggggatgacatttttgatgggatgccaaatgtttagcttctctgagaggcaacatttaagcaggaacctcaatgaagtgatggagcaagtgatacagatccctgagaagaggccactgagggggcaacatgcagagccctcatgggagtaggcttgatggaatctgggaaaggcaaggaggttggaattgctggagcagaatgagaaaggggtgagtttggagtagtagccaggaccagacagaggctttggattttctaagagggaagggaggatgttgggagggttcaggatgggtatagacctgatctgagtgataaaaagattacactagttgttgtgtagacagtatactaggaaaggttaaagtggaagcagagagactagttcagaggaccgttgcagaggttcgggttgcagaggttcgggtgagagagaagggtggcgtacactaaggtatggtgaagggggcgagaaggaatgaaattcaggttatattttgaaggctaaactcagcataatctgttaattggatgtggatttgagagacaagaaagacaaggctgtttccaaagctttttgcctgagctattgtgaagtccttaggaaacacacgagtttggaatggagggaatctggagttcaactctgcacaagttaactttaaggagatgtcatgtcaatacaatgggatgtgaatctatagtaagattggaggttggggctgtggaagtatacatttcagagttatcagtatgtatctggcatttacagtcagaaggctacgtgatgtcacctagagataaatgtgtagagaaggatgagttctgggaaaggatctctagacctgccaatatttatagatcagaaaatgatgaggactttgggaagatccagccaatgacttgataggacaataggaagatttcagagtcctagaagccaagtaaaaaaaaaaaagtatctcaagaacgataaggggaaaaaaaagaatgatatgaaagatacaacaaatatatgaaaatcattttgaggatataaaaaccactactctaacaattcttctggctcttcttaattttacaatctggtgtgaataaatggtactcactttctaattacagtacttaaagattgagcatatctctaaagcatgactgacaaaaaaaggaaagtaaacagattttaaattaaagcattctaagttcagtgatattcaactcaaatatatcataccacattttgaagtaaatgcttttatcttaaaaaatgttaagaagctctacgtaaaattttaatgcgagtgtgtatataatttgcatgagcagaaaggacacgaagatttcttcttgaagaacagcataataatagacatgaaaagaatcacaaacatcacagttaaatgaggtcaaacccacgaaataactatgctgtaaatatttctaagttaaaaagcttattcctatgtaaaagtaccagtggttctcaaacttcagtgttaatcagaatcacctggagagcttattaaacacagatttctgggtcccaccctcagggttgctgattcagtaggtctggttttggcctgagaattcacatttctaacaagttctcagggtatttcatgctggtggttccgggaccatacttagaaatctctggataaactatagctcctagggcagagctcctctttactttatgtttgttaaaggtaataataataatgactatttcatttaataatgtattcatttaataatgtaccaggcacaatgctaatcattttgaacttatttcatcctaaaaagaatcctacgagatagttgtcactttaggtacatggacacggaggttggaaggagttgactaactcgcctagagtcaccagctaatcgctaatgaagctgccaatacaacttttctctgccagaacaatactggctagaaccttcttcctcaaagtgtggtccatgaatcaacctcattgatgttacccgggagcttgttagacatgcagcatcttagacatactgaatcagattctgcaatttaacaagatcttcaggtgattcctatcaccttttcaccctggaatttggaaagcataggggtagagagctttttagcataactcggagcacataggcaatcaagaaaacattggggggaaggaacagttcagaaaaatagttgggatcttgcattatgtaatgtcagaatacaaagtattctaccctgggaatgaaatatccaaaatgcccaaaatagcaggttgaatcgcacaaaattgccagtatttaactctttttgaactgcaaaaaaatcattttaaaacctaataattagagtgaggaacccaaattgaaatgcctgtgagacccaaagatagattgcaaatgaataatggcagctgatatgctttattgaaatgaatgaaaaacaaatgtcagaagctctgcagcctaacactgtgtgaaggcaagcgtgtatgctgaatgggcgtggcctgttaccttgcagttcttgagttctggcggagagtctcagcacacaagaagcttatctctgagtagcttccttggtagtgggtacctgtccagggaccagtacctgttttcacccatttattccagtgtaattataaacataccccttttactctcctctcaagggtctccttttgggtgacaaattgtatggtcacccaacttataagaaacttggaaaaaagtaatgttcagaaaaatatgtgtattaaaataatagcaaaattgattataattatatatttaagatttaagcattagtgttgtaaaatgaaagaaaggttgtttattacagttggtcctaagattaagagccatgccaatactgaggagaaagcagatgatgagcctcggaagacctgagttttgaccgtggttttgccactagctatgagacactggaaaagtcagtgaagttcacggagtctctgtttctttatctatgaaatagaaatagtaaaggctgctttactgactctgatgccatgttatgtggattatataacatagatggaaacattttgaaagtgttaaggaagtacaaagggtgttcctactgggccaataatatgttgtcaagaaaggaagaaggggaaaaaacaggtaacttttgagaaagtacaaaaaggatattctgctgcttcaaattaaactacaaaagataactattggtaacgcagctagtcctcttctttacgtgggtggttgggggtgagtcaccactcaagttcagtgaattgtgccaggagatactctgcccatcaaagctcatcattagcgtgtcatgcagttagcaattgtaatcagaaggaatttacaagaagtgaaagtaaaataccaaaacttaatgtaaaaccattactccttatatataccaaattcttgttgaaacaagttattgacttttgtctgtaactggatttgtgcctctgatactaaggagataagagttcacttgatgccctcctcttcttacggtagtgaagctggatacatttgtctgagggttttctgggaaccatttgttttgtagtcagtgactttctgtttctacactacgtaggaccttttcaaggaaagatagcaaacaaagcaaagaccttcactcgacatcttgtcatgggatctggaaatggtagatttcttagatttcctgatggccttaggaaatttattgactatcatctttagaatgttttgtggcagatgatttagaaatagatattttaaacattttttttcaggctgggcatggtggctcatgcctgtaatcccagcactttgggaggacaaggcaggtggatcacttaaggtcaggagttcgagaccagcctgggcaacatggcaaaaactcggtctctactaaaaatacaaaaattagccgggcgtggtggtgcatgtctgtagtcccagctacttgggaggctgaggcaggagaatcacttgaacctggaaggcagaagttgcagtgagccaagatcgcgtcattgcactccagcggtgctgatagaacaagactccacctcaaaaaaaattttttttctgtgcttattttggcacaattctgtacatatcattaagtcaggactaagaattttttcttctttgtcacaattttcctggtttgttacccagaatgggtaaaaaacattcataataaactgattaacttcaatataatttaaaacttctctggcttgaatattacatttatttatctagtagtatgcgttggccacaggtattttaattttacttgtgcaaactttgacagttacagaatatatgaacaagaggccagtcgtttgtgagtatggggtaatcaaacctgtaacttattaattcaagtttttttgctaatgctgggtacctcagtcttttctgttccattgaaggataatgttctaagtctgtcaagtgtccccagtagctgtatatgccacaaaagaatggccaagaactccatggccttagagaagcagtaatgctaaagccagtctatttgtttgactatattagagtccataaaaagcttactcacgatttaaaaactgactttctccttattttcatcttttggattgtcattgtttgttcagttataaagtggcttgttgacaccaaatattttaataatttgattccaaggctttgtgcctatgcctttgagatgctggtgtagtaattaaactgtcttttagctgaaatgcttgcaaagcgtccagttctgtgcctggcagctggtgatgcattatagagacattgagctaatcgattaaaaccgcagaggcatgggagttgtctgacagcactgtactaggatgaaattagttggaattgcatggtgaaattaaggggaatgcagctgattgcagcccttctgggagaatcctgggtgagagggacactgtgcgttgatccctgcgtaattaggacagccatgttttaaccgtatttctaaagtattaaaatggactggataaatcagccgggctgcttccagtgaacttggcatccatccactgtgactgaaataacatgaaatttttcggctgctagagaatgtgaaattggactaattgtcttttaactagtctgctcgactgctagcctggagcgggactgaataggggataggctggtgggactgcagctgggggatgggaaactgagattcatgactattatttcagtccatctgaatggataacaccatcacatatgcagacggctctgatttgtactgtctcatcatgagaatcccttcctaaatattttaaaatccattttaaagtggatgccttgattcaaagactacagaagcctaaccctgttcctttgacttacattattgctcattccattcttgagattcccctagaaaaatgagagatttaagaaacttgaaaattactcatcagctgtccacatgtgactctgccccacagtctattatgagcacattgtgcagagaagggatgctgatgcatattactgattctatgtatcaaacaaaggcttgttccataattgctgaatgttatgactggtccatcattcacactttacatgtgattaaatagagagccagagaggataaatgacatgcccacggtcacagagtaaggtcatctagggcccaagattactattctgctgttcatttcattgtagtgaattgccattgttaccagcaggtagtagtgtttggcttagcattacatttttctgtggatccataaataaaggcagaatttctatgatataggcgttattaacagtcttcaagtatttgggttatccttctttctttaacttgattgaggtcactcaaacttactgaagtgctatcactatcaatttatgtttctagaatataaagcacatagacaaacatacacacaaatgacacttcaacaagtctcacggaggcataggaatcatctgaccacattttcttgccttcagaaaggcatatttccttgtcactatctattcttgtacaggtgactcttcacaaactattggaaagcctcatactagactgtatcattttggtccattagagaatttctcgagttgaattgtgttgtggcatcagacttagtatttaggggaatcagacaaaatagaaagaaaagaggaagaccactaatcattgtgcttaccgtaagaaagttgttgtgggcatcacatatcagattttctttctctgaggacctgtagaaaaggtttctctatggtcctataaaggagtggttaggcatctcataactagtgtgtctttaagtcatggatcccgtaaaccctgtgaggatcagaattgtggcctcctcctatcaggttcagaagacttctttgcgtgcacattactgtttaatactttgtttatcttcctcttaattcaccatcctttttctcctttcttcatatgttttatttgttgttcaattattgtatcatgctatattgtttgcatctttgtaaacttatttaaatctttttcagaataaagcgtagtattaaaaataaaacaattcttacacatgctgtcctcatcccaaagtacagccaacagatattagaggaagaaactacaatattaggggaaatgtacttctctatcccctggatacctcgcataccctcatgtttggctgtattttggggtcatactttagatgacataagagctattgtttcttcatagaaacagtgctctatttttttttttaaagattcttaactctgcataatttctgcaaactccagaatttcaaaaaatttataggtagaagcaaccccagaaatgcattacacagatgagtagtgtgtgccagtatgggtaggaagctgtacatgcaggtcagtatgagtatgatactaatagaaatgaaaagcctctatgtatagatgcttgatttgaagccacaaatctgccacattatatgcactgtttattattagacagtaatcaaattactggcagaagacaactcattaccttcaaaatgattttttttctccaaataatgagaaagaaaggaactgtttcttaaggaaaaagcaaattcacattgcataatatgtattgtttatgtgtactttctatgtacctgtcactggtctacatatttcatatctatatatctatatctatatctatctatctatctatctatctatctatctatctatctatctatctatataatcttctcaacatctgcctgtagtagttataagctccctcattttgcggatgatgaagccaacccttatagaggtgaagtaccccgcctgcagtcctgcactcacagaggtcagatgtgtcctatagagcccacgctgtaaccactatgctagtgtgcactttggaaacgtccaaggagatggaaaatatatgacttcctaagtggctctcatgcacatttattctccaagattaattaaggggcttctggagcactcatgtttccattcctagcatagtcatatggaaaatgagaacatactttaaataaaatatccacttggcactcagagcaacttaaggatctgattatcagaagttgaactcaaatggcatgaggaatgaaaacacatgaatgggagtcagagctgccgtagtcagaagcttggttccctccatgagttcccacctctttacacacagatgaaaaaatgacctttctgattgctaatcaaatgggaacattagtgaccatcattaggttaagaactaaggattaatttattgtgcatttaagatgacctggagaatagacagcatactccgtagttattgagtaaaatattttctccttccaattcatcttggctgtataaactcaatgacccatctctggaatggcagatggggccaacagtcaacaacaatgaggcccagggatgctgttacactcaattcctctcaaacacgtgttccacacttacaggttagtgaagaagctaggtctcaggttaaatggacttaccacaataacaacacaatatattgagataagaaaaaagattctgcctccttctgcaaccttgtctctctcacaaccctgtgacaccctcctgttacagatccactgcttctctttctctgtcttgagacatttgtacctgcagtgcctcctgcctggattactccccattcccctaccgttgctcccttttgtttagaagcctaaatctacctcactttttaaggagtccaaatagaattgaaagctttatgtatgccactccttcaactcctcccactttcctcctaggtaagactgaatttgttgcactctgccaggagcacgagcagtgccttgtaaccttccccatcccaacctatcctacccttaaccttgtcatagcaccccttacactgttttatgggatgtctttgttagtttgtctcccctccccaggctgatgaaacacttgaaggcagggaccatgactcttatcttccctgttgtgcttttaatgcatggtatgtgcctgaaatacaatcaatgagttgagttccaaagatcaggtagccagttaaatggctatagcagggctcaccccagcctcctgagtccagggctctttctacttctttcacaggtcctacatagatcaatatttttcctactgtatttcctcaatagaatttcatataattatatctcatacttggtagagttgatttaacttaattaccttctagaaagttatatcgcattatgtgaacaatgcttttattcattcctttattcattctgccaactatctgtggatacagagatagtaatcatagttgttttaaaaaaattccatgagacagataaacaaacagataatggcattgtgctgtgttcatgcccccaaatgctttctattgaaaggactcttagtttctaaatacttgtgcttattgaatgcgggtagttatctccttgtggggttaccgaatatcggcctgaatgagtgattctgccatctcctctctagtgttgtttcttgctattataagtgatgatagcatgaatgtgagggcttttcttggcacttttttttttaaatcaaaagttggctttcttcttagtttttttattaggtagtctctaagtgcaccagtttcttatagccttctccactatagttagaggattgacttgctctgacaatgtggtttctgaaatcactacttttcccactgtgaagaagatagaaaaagaaacaaaggtatatccctttgatgcagtgaaaatatgatatttctccatggtaaaagagcagccgtgatttccttaaaaatcatttcctaagtgggagttgggctacttcctgagcagagaatggtggttatccctggagtcatccaaaagatacatggttagcaatgctcgggaaaaaatctaatttgcagataggatgtttatctttagataataaaagcctggaaatacaatttgtaattttaaaaataaaatataggaatatagaaagaaagaaacttttcccgtttggagttattcgtgggagaaaaaaagtgatgtgaaagtggttttggaataaccatatctcttggaaatgctgtgaagctttcttctttttattgtatgggcatcttgctgcaagctcattttgttgttaaacatgaagttttacaatgtagattgcactaagaattttttaatggagcaatttagagcagctgcaaacggctctggaattcccacggattagtctacagacttttctgtgattacaaatcccacagtcagaggaggtgaggcgtgtaggtcctgggaaggtgggggtgtgagcaactgagcaggaagcgagaaagagagactaaccgacagggcacacacatggacagactgcctggctgactccacgtggctgctgttacctactccatgccctccttgtttacttacctcatttcttccaagttaaattactaattctctccatatttacttaccctattccctccacctgcatccctctcctactacttagtgcaagtccaatactgtatctacatcacgctttaagtccaggactcatcagaatacccttaatctggtttcctgtcacagtttggagaaggggttagaattcagagctaataattcattttctatatgagaaaatggatactgagaccaaatacaaactagagcagggtgaaagaactagttaaggttgaaatatggactagaaccatcgttcctggaattcagtgcatgtacattccaccaaactggcatattatgttctattattttgtacttgtcaacttattgttttattatgtttgcaagtaactttgtgtatgcagtttttttcttccctcaaaatcagttttataagcacaccaaccatatctcttagttgcactatctagtatttattgattactatttatatgcaaattactttgcaatcctttccaaattttgcattgcaaactttctatgaaatggatgttagtccagaagaggaaactgatttagaaaggttagatatctgtacagtttggcatgggtcgatgtgggagggccaggtctgccaagtccaggagtctcagcccttaatagccagttcatggtctgcattctttgtcaacactctacattgtcttctcatctgctttggcccttgtgcatttttcatacatcctctgtgtaccctcaatatgtgttaaggccagactttgagcatctgtcttttccaagactttcatatttcatagtctcacaaagccatttgtccccatctgatctaggttatgaactttggaatgggcgagcatgttccccaggctggaccagattggtcacagatggttatatggaaattattaatatggcaattttacttcaaaaatccattctatacaaccacatgcattgatatgggtgagtcctaaacatgatgttgagtgaaagaacccagaggctaaagagtcatactgtactattcattttatataaaggaaaaataaacacatctaaactatgatgttagaagtcaggagagagtttacatttggtcaagcagaatgcgggggaagagtttttggggctacttgttggttacatgtgtgtacattttctaaaatgaatcaaactatctgcttattacatttacttttctgcatgcatatcatacttcaatctaatcatgcacatgtacacacacccacaaagcaaaatatctaaaaaatctattgtacacatttaaaattattatggaacctgagtctagaatgaaccaacgttggggagtgctcaatcatgagattccaattagcacagtgcctggcatatagaaggtggtcagtgtttgttgagtgaatagaagaaataaaacactaatcttatgaaattagaatgccattcataaagtgtaactatgtgtttcccaagtcacttacggagagaaatagtgatacctaacattttttttatgttggagatgccaagtactgtgattaagtgtttcacacagattagtgtacttaatccttataatccaagaggcacgcatttttatcattcccattttgcagatgagaaagtggggtgctaaaggagtgtttttctgaaaacatgtgcctcgtaagttttagagtcagaattgaatacaggcattctgattccagagcctttgcatttgaccatgatgatgctgttatatatgtatgtgtgtgcatgcgtgtgtgtatgtggtatcacacacacatataaaatttgttatcttctccagccctgccaaaacatggtgatgacaccctgccccttttaaaacctgaaagatggctttagtaatctatccttggcccttttaaaacctgaatgatggctttagtaatctctccttggcccttttaaaacctgaaagatggctttagtaatctatccttggccaggtgcggcggctcatgcctgtaatcccagtactttgggaggctgaggtgggcagatggcctgaggtcaggagttcaagaccagcctggccaacatggtgaaaccccatgtctactaaaaatacaaaaaattagccgggcatgatggggcatgactgtagacccagctattcaggaggctgaggcaggagaattgcttgagcccaggagtcggaggttacgttgagccgagattgcaccactgcactctagactgggcaacagagcaagactccgtctcaaaaaaaaaaaaaaaatctattcttgtctttaccccagaaattggctgtgtttctttttagcctgttggtatttcccatcaaaatgctgtcactaccaagaaattcctgtctgatacgcccatctcaggcttcagtttccccatggatgttgtcttttgtacttctgaccatctttttagggaggtggagttagaagccttttttctacatccatttgggagctgcctgtttcatggccagtcccatcaggaaaatgatagactcaatacatgtttagtatttttattataaagcattaaatatatctatcacagcttttaaaattgcctgggttcatgttacctgccaagactgtccactattagcctgaaggtttatgtaatattcacagttcagattatcaatataaaccaaaactctagaaaatagacactagagatatgagcatgcttttcattccaggattgtattttattgtttgggtctggaatggaagtggagaggaaatatcccaaacaggggttattacccctaggaaatacggcaaaactagggagcaaccagcctgcagtatatagaatcttcgagaaagaggggctaagtgtgtttttcttctgtgcaagtgtacactttatgggatgaatagcatatttattaaattcaaatatatgtgtgaataaatggacatgtgcttaatgccagcaggcagctgtgtgggtgagttaacaaaatatgccccagtgcatctcagcagttgcatttccttcctgtcaattgtataatcaactggttgttagtccaggaagcaacaatagtaacaataaccttcttgctctaccgtgcacactaaaaaagaattttttaaaattgcatgttgaattttttaaaggtggtttgctttcttccataactggatgctttgcccagcatctggtttgccacagagctcagagaatgattttgtgggaacttgatatttctgctccaggcaccagagaatagaactcggcagcatctgcataatccctttgtaatacagtaagtttaaagcggcagcataattgtcacaggtttctaaagatatacacagaatgaagtaaagcagattctggattagaaggggctgcttggatcttgccccactttttatgactagttttatgaatcagatggcaagtggaatctacaagtggtatctagctgtacctctcggtgtatctaggctttgcaatacgaatggctttactctgtaaggagaatggaaactaccgatctcattccattttgaattgtaggttcaattcaccctatggagccagaggggaaagcacaaccccatgcttaatttactaggcagtctagcttccagttctagagcttaaaagtatatcagcttctgtttagataacagatgaggatgctgttaagagagaagcattattgaggtgtggtgatagcacagataggtggccgtgcctaactttctatatcatgtttttaaaggccttatatctcagcctggacttcatgtaggaatatcaggtttgaggtgaatctgttttctctgatggtaatgcaggccagggccatattaaacaagcagtctgtcattaatatgttcaaggtgtcagaaagtaaatgttgattttatcattgtggcctggatttatttttctctagcttcagcctcaagatgaggatgaaagaaatgaatttgtaatagaaagaggtgaggaagaaattactaattagttaaaaattaaatgctagagattttgtttgttgtgaaagtcatacaggatccgctggctttatatttttgaggtattccactttctgttcaggtacaagctgtcaatcaaggctaatcaaactggcacagttaacatgatacatcataaaatttcacaatcatgtcaacctgtgattctgtcaatctgattaagggaaatgggctaaaaacaatattgtcattttataataacactcagaaggtattacggaataacggtactgtcagctcccgtgtctccacgcctcacttctaccagaggcagcccttgctgccgacaaatagccaggggatcaaagccattccttgttctcaccactcatgaggcttggcgtagggctgcataagtggagaatgctgccccacagcattttgccggtctaatttctttgataaatcaaaaaggatgcatttcagaaaacagtgtcagtattttatactccttgcctcatgtagtataatatacatgggcattgaatactcttatttattcagtcagcatacttattatgcatatgttctctttttatgaacttacattccagggtgtttcaaaagcatccgtttgaaaaagcattgcagttaacagtaaaacacaggctacccgttgcaccaaccaataaaacatggctccctctgcaaactttatgtagtgctttgcagccccaggatatcatggtccctcattgaactaggaaggataatagactctcaactcaggaagcccctagatctgggctctgtcctcgacgttttctgagaatccttgcctggacacgtgaactcccttcagttggcaggtcttccttgtggctagtgtggctagattttaattattaaatatttctttattgtgaaaaaataaaaatcaccccttcatatttctactatagatataccctcagatatttttattttaaatatgccctaaaatatgttttacagaaaaaaaatttacagaaggaaaagattggccagtcagtgattttcagtttttattttttgttatttttttaaagccaaagagacttcctgcaaagacgacttacccaaaaacataaacaaaaacagataaagtagaacttctttagttgttggagggggagtccgcattcaactccctctgacccttcttttcatggggcactttttgtaaatggctaaagtacatgatttctagtgtcccattcaaataatccccatgtattcttgtggaatgtattttgttgctctgatgcaagacaaattctttcagggaaaatgtcttggtgaggtcttaaagtttcaagagactgagaactttctaggttactagaatcaatggggaggtattcaagttgcacaggtatatgaggaagaccaggcagcagtctcagcttgttaaatgagtgtttggattataattttcttgccgcttgattcctaggagctctcgtgacccatcagatattctggtcattatttccttagaactgagcatctcttgctggccacctgtactacactatgtccatgttgctcttgacgaaccctaatttctccagctggctgcattctttgcttactcatagtttaatgatgaaaaatcttaagatatagaaaagaaaactggagtcgaattgactaggaaaaatatatgagaaatcaatttgaaggtatggaaagagttattgtaaacttaatttataagcagaaaaaataaaggtgggcatggtagaggtgtaagatccataccttctctgccctgccccttttctcaataaacatttattgagcatctttttaggataaaaagtgttgatagacaaggaagatactgttaaaacattctaaaaacattttccaaagaatatgttgtgagtgatttaatgagcataattgagtgatttcaaaagaggggaaagaaaacacttaggatggtaaccagtttttccttgatcatttttaagaagagatattcaataatatggtggaaagcctaatacaacgctgagtaatagatgtaaagggaagacttctcatgaacggtagacatgttaacttgaaaagggtggaggaaaggatcttatgattgtaaaaggttagtaattaactgaaaagagatatacaaaattccaaaaactacagtgccatattttgtgttatggtgaagttcaagaggtcaaaataatactaattttacttccagcaatagtgaagagtttagaattaattagccagagtattaaggtaatctaagaaaataaacagacatttgtcagtaattggatggctcagggtaaaagaatctttggccactggtatatggatcattaatgcagcaagacaacatttattaaatagtgtaggcaacctgctgtgcaggtgctaagtaaggcaagatatgtaagaggaagtgcacacaaataatcacaggacaaggctgaataagatggtaccatgagaaaaacacaaattttgtgcaactgaggagggaaagcttgctgcctgcctgggtagctgggatggtctatggaaagggttggagaggtttctcattgcatttaagctatagcctagacgtattaccttgaagccatggtcttcccttggactgcctccctagcttttgctttctctctattcttcacccacattggtcttctttcagtttctagaagtctccatgttctttttctccactgcctacagacatatttacctttttctggaatgctcgatcccagggcctcatttttttgacctaattttactttggatcttactttccatctcatctgaaatgtgagttcctcagggcagcctctttgatgctccatttttggtcttattgctttgttatacactctcagtggctcaattccttccttcataactcttctaattatacagctgttagtgtgatgcattgttgaataagtctcttccactgattggaagttccatgaaatcagggatagtatttgtttttgcttggctctatattcttagtattgtgtgatcagcatgtatttaatcacgtgatgatttaaataaactatttagagtaaaaatctaaataagcatcactacccgtaaataattaagacctgattatccttttcccaaattttaatggtgtctgtattcattgaataaaggagtatttatgttgggccttaaaagatgaacaggaatcacaagtgcccaaactggaaagtgagggagagagctttggcagatatcagtgatgagcatgacctcagatggtcaaggaaccgatgaggtgtgcttttgctgaagccacgtggaaggaatgtggggccagatcttttagcgtcttgccttccaatgtgatgctgtggtgttcgggatcttgcagtgaaatttgaactcttggagagtgactttttaggaccctaggagggaaagataattttatagaaaaaatagacttttatttatcacaagctaagatttacaaaagaatttcaaccaagtgtgttgttgggatcccaaaacgtagctatgcaaaaataatatttttaaaacgaaaacaaatttaaaacaccaagggattattatagtgtgtagcacaaaacaatggagcgtccccaaattagcctacgataaagtcatgctctgatgactaaaaacagaataaatacctcccagctcccgtaagtactgatgaagggtaggcctaaagttggtgttttcaatttctgccattgaaaggagacattaataaaagacttcattttaaaagtccttttctgatactgaaagcctgccactgtgtactccgcatgctggctttcatttctatctagctccactttgtcttccctcagccttctagatactactctgtagattccaaaaatgaggcaaatcatactcctcaagttaaggattcaccagccaagtagttatacacaaggaagagctgcttattgctgtcagcatcaacttcacagaataagtgtaggctcacttgcctaggtaaagcatatagattggctctaagtgagtatcgctccctgtgaataattgagatttgattatccttttcccaaattttaattaggatacttatgtaatgtattttattttaatgcagaggtatttatagagtccataaggagttatatcggttcaaacatttctcctaaaaagaacaaaggttttatttgctagctgagagttcaagatatccttttggagatgaacagtattgctcacttataagaagcagacagtcagaatacaatgggatggaattagaagacctgtctctttcagcaagttaagactttaatatggtacccctgtataaatgtaagaaagttaactcattatttgatcatgtatgctgcagtgctttacaaatactaaaatccttaagcaatacaagacataacatattctgtccttttaaattactgaaagacgaagactctcggtttcttccaaatgtttccctgaaacaaaacagaaaaaaaatgcaagcggtgacttagaactttggaattagccttgatttttcagatgctactataccagcagaatgagttggactttccttctgccatgtaaagaatattcctggaaagttaaatttaattcctataagatacttttttttccattgaagatgttgttgttacttcattgtctcttttaatagatatatatttatatagacatcattcagtatgtgtacatgtacacacatctaccccaataaacacacatacacggccaccttactcagtagtgaaaacttcgcttaaaaggttatagttttcttttgtaagttcagattcttccatgcctatctatctgtgtctttacagcatttcttttctggtgttaattcaaggcattgatttaaatctattaagcccagtagagttgtgtgtgtcttagataatgtagtcctaacagatgagggcacctggggtgcagctggtaaccaccactatatcacaattatgtttggatgtagatgtgactccctgtattacagagatctgcttccagatttgcaaagcctgcatagaaatttggtgtcctatgatagccacagaattctgagtagaaagtttttcgactccatttttcttggttcacgtagaagcagaagtgttcagtttagatgacggaaatgacaaagctgtggtcaagaattttattagtccgggtaaaattatgtttgttttcctgactagaaaactgggagctacttataggtgaaaagggtcttttctgttcaagctgatgactgtggctaactaacctagctctgttcctctaagggacaaagaacagggtctgtacttgagccagcaggcagtgctggactttatttaagaataaatcgcatccttttctttcctttgatgctcaagaaccctatttctcatcctttttttctctctgcatacttagtgatgacatatgtaaaaatcaaaagactttgaatttacataaactgaaaacataactagaatggagcgatactgcctataaatgagttgagaacatcgatttgaaatgcagacttcctggttctaatcctagctctgccatttactgggaatgttatctgagcaaattacctctctttgcctcagtttcctcatctgtaaaagaaggaactttacctctgggttgttgtgagtattgcataacttaatatatacaaaacatttagatttatgctatataatgtatcataagctcccagtagatgtaatttatagtaattatctggaaacatttatatatactattattcataatatagtaaaggaatatcacaaaataaaagtgctcagttcccataatgaaaaaagggagactttcattttcttgctgtatctccctgttactctcatttattgttattttttacttggagatgctgagcatgcatttcactaaaaatgttgctcagtagccatatttggtaaattgattgctagtataggcaaatataaaataaaaaataaatgcacacacacaaaaaaaccaaacagactaaaataaatattttgggttctccttggtcctgctgtcaggatccctgctgcttgcatgtaaaaagaatcctttcctttcattaggaggaaatgggagtgctgacatttccaactcttgccagaggacctttctgagctcgctagttcactggtgttggagccttgtgctgctgccaccgcgtgagaaatgttatttaacatcacagcgagtatcacttcacctattccaagttttcaggcagcttcagatgagtccttctctgccctccttttggactggctttgtaaaggtgcacatactggagatttaatcatacactatgcaaggcagagagcaactggttattaagatttttgaaggccaggtgcggtggcgcacagctgtaatcccagcactttgggaggccgaggtgggtggatcacctgaggtcaggagttcgagaccagcctggccaacatggtgaaaccccgtctctactaaagatacaaaaaattagtcagttatggtggtacatgcctgtaatcccagctactcgggaggctgagacaggagaatggctggaaccgaggaggtggaggttgcagtgagccaagatcgtaccaccgcgctccagcctggatgacagagggagcctccatctcaaaaacaaacagagatttttgaggcacttcctgcagtgaaaggtctttggtggtttccaataaaacacccaaatgtgtttttttgttttgtttagttttgctttgctttttcccagttagctctttcagattgtgctgggataaatattaagtttcagggaaatctttagagactcctctttgtgacacttttgcctgtgaagtctgatcatctttggaaattatgtaacttgatgaccagcttacatttacatgaataaatcaatattttcagacctaaaatatgtttatttctacctcttgctaacccctttcttcctatcaaggtctatcctttcctatatgttttccctttccatttggtctttgggtatctactatgcacagagatgtaatgtcatctttattttaaatgattctaggaagataatgtataaggggaaattcgtttaataaaaaagtgatatttgacattcttttccacgtaaataacaaaggcaataaatattattataatctgaccatatcttttaactaaacagaatatctggaatttgaatcattaggaaaacaggaacagaaataatccttccttcttttcctatttgccaaccccaaccacatcctataatggtgactgcttcaaggactggggggcctgtattcattttataatctgtatcaccaccaaatcaccacaaattaatacacaatttaaagttaaaaagtgggatttcaaggtaaacgtagcattgtgacaggtccatttgcacgccttctcatggattcttgcctttaaggccccaaatagagtttctggagctgccatagatctatgtctatataccaaagttaagctgaggtataagtgaatatgtaactttggccacgtagtgttcaaacactcttctaatggtgtcagtagttttcccctgagataccgtctttcccttgagcccacatcttagcttctgggttagggaagagttatttccatgggaatgggtttgcgattcagtttttccaagtggagttctggatgtcgctggccatgccatcatgattggtttagcaatggacatctgagtcttctgctggggctgttagaagaaaagcgtgccctattctacaggacctgaacctgagaagacacagcttcggtggtattggcagccatcttaccacctcatagagcctgagcttgacttgaagcccaccaagtagaaagagctgggagatggagggaatccagatcttgcagacagaatttgaaccctgcataaaaccctatctgaaatcctagaagctagtttcttttttttgtgtgcttaagtctgagctcagtaggattctagttgtgcttaagtttgtgctgagttggaacctctgtctctttaaatcagaagagtttgatgctacaaaggaataggaaagggggaaaaaaagcaatgataaaatatatagaattccagagcatttttttttctttggagtgaaataacattaaggtttagaaaaatatttggaacattatttgaccttattcaatgaattattatagcagttaggttcaatatagtagtttctgaatagaaagtgattttctaagcaccaagcacatgtgttataggtcatgcaaagatatgatttaattacatatgcaggtcatcctcatgataattcaaaaccgtagtacagaggttaacttttaaatttgaagaatgacaagatttgccactatttcaggaaccctgcaagaccactcccagtatcttaattaaaatatgctttgagtatctttctttgtgattaaaacatgttcaaagatttcagtttacatttgattagaaacttgagcttctttaaaaatatctaggatagtattctgtaagtgaaaaatgttggcttgatttgggtagctatttatgcaagtcttgtttccaaatacatttaagaaagaattaaaaatcatgttttagctctaagtattacagtctgaggtttgcaagctgtgcttttaattgctcttgatgcttgtaagttgggctagtaaaacagcttgctttcaacaacgaccaaataatattggcttaactattataatgaaccaccacgtaacattggcctagctattgagatttaacaaaactactgtgattgaaaagttattccttaaatcatcagcccaacctctgcagcatgctgcttgaagcatgcaaagtgtactccactttaaagtgacactgcaaagcaagtgtgggtctttgtgcttcagatgaagtgtgaagactctgagaagctgaggggacccacaggaggagtgggcagagctggagttctcatccccagaacctagctttaccctacctccctggaccaggggctggccatagagcaggggagaggctctgcattgcgggtgaggggtggagtctccttttgtaggggaggggttgggggcctggagagagcacctcccaggatcccccatggaggggagcatggctactagacatctgttagggaccgtatcagctgtaagccagccaggagcctccaaacacccctctaagctgccctggctcagattggggacctgagtcccccagcacccctcagaggcaggcccaagcttagaaataggattgagggccaggtagaggaaggtggactcccagcctctaggcagaccagagatctggagagaggggatagcaggtggctttgatattttctcttgcccaagacttgggtttgacaagcacttggtgggtactactcctcatgttttttctcagtctcctgccctggagcagcagctcccagatccaggtctcctactgaaggttcacccttcctctgctgccacttctcaacatccacctgtgggaatattatgagattcatatgaagtactatgccacttttcttccatatccccctgacgctgcctgagcttcctgaaggtcctcacagtttgcatatcattcaggccacctctaaaccccacctaggttttatcattatatatatatatatattttttttttttaaatctagctgtaatgggttatttcataaataaggcttggggctggagcaggggcctccaagcctctagctcctgctcaaaagaagaaaaagttacttgtttgtgggtcaagaaaaagaaagtttgtaaaactcaaattctactagcctgttagacagagtgggaagtcttgtgagcttcttttcagtggtgtactccaccagacctcccaaagctaagcgtagtgggtactcttggcgaactggaatgttaaaatgacatttggatttgaatttaactacatgatagtttctgaaaaagtgtatatgcttttgtagcattactaaaatacttatataggcacagatgttcagatattttaaagtacaagaacaataccagggataaagcaaatcagcagtataaactactaattctgtaagtaccatggtactggtaacacacagagaattatttttcttacgttatacatcagtagccatgttcatttttagtatttttacatttatcattgttttcccatggtgtaatgataggtactaacttccttataactctacaaatatgtttttcgtataatataaaagaaacaggccaacagtagttgttccaagtgaacactggcctatttctgacatgacttggaagctggtgccctctccgtgcgtggcttgccttcccctccggaggggtggcttatgtctgttttattcaccaatatatctcagcatctaactggattctcagtaaatgtttttaaataaataaatgaattgatgaataatgattaaattaatgaacaaattaataaacagaaataggttcttgatttgggagggaggatttgcatacaacaacttgtatgtagatggacttgaaaatataattttctttctactactaacagtggcattattaaggaattaggaagaataggtaagaacactgaagcaaatagaaatctcagagcacagtgttgaaaggaataggttaagatctgaaagagtgatgacatacctagtcctgcagctgggactaagtgaaactcaaaaaatgatggatgagaattcagaaattaacaagggtcagtatggccagaagaaaattgaaatgaattgtaacatgggtaaaaaacggtgagatccagccatcattattagtctatgcatcaaagtgtgaaaagtcgttgatgaaagaaactgaaatggagaattatttttaggctttggaataggaaagctggaaatacactagaaaggcataaaataaaacatagactgacctagattttataagaccaaagtacccaaaagacaagccaacttccagagcgatggctttattcccacagtctacgttacgctacataactcctactagtggtagttctggaggatgttagttcctacacagtgatgatctggttagttcaaaatatctgtggttagaaggaaatatctgagctttcactcttttgtttcccatttcatatttccacatagagcagttacactctgtattttagagtcctatggatgatgtggttgtgctaggaagtgcctataagcctctctctcttttttttttttaatgcccctatatatttttattttctattagcaccaaaaaagctgttagcatttgtggccttgatcaagcttagtcacagctttctcatctttaaaaatggcttctcgcaactattccatttggaaaagctgtttatttttggtgacttttggccatcaggactttatatataactaatacaaaatgtactttggaacttgtcgccagatatttttttccttttttcagtcctgaaaatagtgtggtaaaatttagaaccttcattctagaagttacctgtgactttttaatggtgaataggattgtgtattcgaacagagtgggtactaaggtaattgttaggataattatgtaaaaggacagccaattatagatttataatttacagaggaaaattagaacttactcaaaatttaacctactttaaaaaatctatataacatttgaaaatactaatatcaattattatagaatatttactatgtaaatttctaactcttattcacactaaaaaaaaaatcaaagttcagccagcaaatattacatttgtaaagaaacatgaatatacaagtttaaataatcagagttattctatggtagttctttcatttctaggttattttctggattttccaaaacttttggggaacaatggaagatggccatttttcattattagcaagcatagattgatagattcttctaaaattatgaataatagaaaaccaaataaaacctcaaagtaggtttgttgcctcagagtagctattcatagcattaagggatagatgcttttgagaaaggaagtgaaacatcttattgtatatcatgatattgtttattggagaatagcagttatgctgaataaaaagaaaataagatgtctcaaattccagtaacttgtcttgttgtggtttgattgttggtgggagatgatgatttacaggacagaaacatagaaactcactaccaagctttgtttttgtttttgtttttgttttgagacggagtctcgctctgttgcccaggctggagtgcagtggcaccatctcggctcactgcaagctccacctcccgggttcacgccattctcctgcctcagcctcccaagtagctgggactacaggtgcccgcaaccacgcccgaccaattttttgtatttttagtaaagacggggttcactaccaagtgttaattccaatttttattaatgattcatcttaaggtcttgagaaacctccatagttgctctgttaacagatttaactcttggaaaccattcataagatttaatgtggaacttgaagttgaactatttgtaatagtccatgcttggtgagatgttggagttctctgtgacagtgaatttcagttatcctttttaattctttttaagctatttcaaatagaagttaaattatctagtttgaatcttgttttacaaagtcagcttaatgttactcatagaaagttggtcctcaaacacaatcctattttcttatattagtgtctatcaaacatggcacacatgctgaaacagtagggtgtaggtggttgattgaataacatctagtagcctggagttttatctgtccatatatttttccccattattttctaaacataagaaatttggattaagaacaaaggaaaaaatatgtttccttagggctacatatgtgacatttaccctatcattattttctaagcatatgttcagaaaaaatattggtactatttatattttagcttaaaatactcatttctaaacagtataatgagctaggtttatctagcatctataaccaagctatgaatactctaaaattttgtgtatgcatgtttatttcattttctataaaaacaccttcctatttttggaaatatttgttctaacaaatattccaagggttggtgaaattattatataagttttacatatatgaagactctgagtaatatggaatcctcactgtcgcatttgtaataatcagaatttcagatatcctaagcagctaccatttacccaagcccaattacatatatagttatctataaatgtccagcattggtgtgggtgtgtcttgaggcagaagtagacaagagacaataataactaggcaaataattacattgccctggagaaagggaaggatttgagagctaaaaaactgtgataaggaggtgtatgttttttaaaagtatgggattagggctaatccaatggatgaagtagagagagagagagaattgttatttttcttgaatcatcattgtattccaaataaataataatataattatttttcactagattattatttaaatagtcattttgcttcttaagttagctatatttaatcagagaagaaaataattagaataatttatctgccaaattcgcctaaatcctttaaggcaattctgtttctaatgaaacaccactatggaaatcaacataaaaccaactgacttttcatctagataggacattctcaccttgcaaagggtgaaaaagaggatgtgtgtcattttcaacctgaaaactattttattttcactgtgaatggggctcttaataacttgatgagtttttgtaagtcagaagtcatgtctgatttttaaaacaaatcaagtaagtattttctggttatatatttactatacctagtatattgagaatatttttaagattggtaattggaaatgaagacattgattacagctgtatccaggtttttgtagccttctaaaaagtcaccatcatattttcaattgaatggctaaatagtctaccaaaggttacagaatctcactggattctccaaactctttgcaccagtgagttatattattgtgacacacagaaataaccatattgctgttgaaaaaatgtgtccaccaaaagttaaagttgacactataattttaaagaaaacttttaccacttcttctatgcctggtattctctgaatttgcaagtgtaggcccagcaaaacattaaatgtttgatttattggtttgtttatagtatgctgacctaggagtagggtaggaaagtggttgggtgtttttggttttttagaccagcattatatattatatttcatttaaacacaattactgtatactgtttcccccatattcttaagttaggacaaaacaaaagtaaaatatttaaactagtatataaaaagaatggtgaatccatgatataacgatataaaacagcaacacatgaaaattaatattcttaatatttgacaaaaactccaggttatttttatctctttctaagaatgcccattatttaattagtaagaaatcttcagacacttcagaagttgtagttataaataacatttttctcataaactgacctagtgatattaaattggtacaaagctcaaaatcagtatttaacatttaatggaacgaacaaactaattctgcaatttaactcaacatttgcagtaagatgacttgtaccctaatggcttgtaattaatctttctgaaaatcatatttctgatagtctgcagattcgggctttatctaatacataatgttcattttgagcctttaattgcatttaaattaaaattggcttagcaggaagatgaattgtgggaatgcatcaaaccacccagcatgtcctgaagatgtgagcctgaaaatgcaatttggtggagatgtgcagaatcatttggagttcattaatttgtattgcacaggtagttttactaaagtaggttattttctttgaaatttatatttatgtttatgtcagtagctgaatattgtattagcccttacatctattagagtttattaacctggcctaatggaggttgttcatattgagaagagagataatttgtgtttgcccctcattctgatttggcaaaactgacaccgtaaaaatgcatttgagagggaaggttgggaaggggagcagagtctttgtggaggaagtcaaacaagtgtctattcgggttccagagtaagcactctggaagaagcaaacgaggcctcctctgagaagaccttcttactgctgaccttctaaggccttccaggctgaataatctctttttctttgtgtgactaaggctctgacctggctattgcagtgaaggctttttgaggtgtaactccgtttggtggcttaatgtgcctgggctttgtccagccagcttgtaagtgattccttaacttgcagatgctactgaggttatccaatttaattataatgtcactttacaattataagggaaaagaggtttttgcgttgtctaatgaatacaaattttctgcaatttgaaaattcaaagaaataaaaattaacatttgtcctctttgccagagaatttacatatgtgcaactgatactaataagtaaaataattccattacctgaattcattaaacacatgtgctttttattttggagattgtatatcgttcttattaataaaatgatactgttagcatttgccattctggactcatttttccccctttgcagacagtgtaattaggggtggaaaaagcttcaggatgagcaaatgcatgctacagaaatgaattatataattgtgatcatgattttccctaaaactcttcctgccaactgtaacgtttttcacctcaccaggttttttttcaatgtgtgtgtgtgtgtgtgttcgtgtgcgtgcatgtttgtgtgctgacttatttcatgaaaatgtggaaatagttctccattccaacaatctgttacaagttcctagtttgtggtcggagatgatagaagcccatattcatttaatattctccaatcagaacttgacagaggtattgcttattttctcatttcatcactgaagcatgctgttgtagtttagtccctaattactctcagactgagacgctccgaatatccccatggtggtaatattttcctgcctgggtgagtcattacgttgtttggcagcctgaaacaccagccttccgttgttggaacactacccctcatgtagcgccacatcctcccttcattgctgtctgctctgcgacttgggtcccgctgcaacatttcaagctatcctgtacgcaatcacatttgcctgccttctccctgactgattggactgctgccagttccctcttcagggccaaggacaggagaatggggggtatctgaatagaactgcttaatgatctaatggaccagtgcctctctcccgctgagaaagagggcttatttgtttgctgcttacaggaaaggtcagggaaatccttttcaacaaaggctgtgacagtgagaatgtgccataccgtacattactggtgtttgaataacttcataccttgggtttaccccacccccaacaacaaaaccaaacactttttggtctttatttcatgttcaatattgtccagatggcagaaaatggaagtgatgaagcttggcttcacacaatagcttataccaaatgccgaatatcaggaagcttcacaggtattcagttctgaagagtgtgattgaagtttggaaatttgaaaatagccaacattttctaaagggactattgcatagtttatatatatatatatatacatacacacacacacacacacacacacatacatacattatatatatgtatatctatatatatgatctatctacacacttgtgcacacacacaccccttcagggatatatattttattttttagtagaacttggaaatttgtcacttttggtttagaggtatgttccttaaataattttcccggttgatctttcatctgtttgcatttcattaaaataaccacaaataactgttcaccacaacatactgggaagttttggataaaagcctttttaaaaaaattttaaataaacaaatgcaatgacataaaattgtattaatagtgcttaagttataatgctaaggatagcattctaggaaaaagtttttattatatatagctggcactttatatcttggtaaacagtgctaggaactgtgacgtagtttcttagatggagaaatttgcgaaagaaaaacatactaaaaggaaaaaacaaacttagatgagccagctatcacactagtagatatttggtgaaaaattaagtgactagaagagatttagattaagccatggagtatccagttgctaccagtgcctgcttctattgagatgtttatttaaacaaagaaatcatcaaacaatagtttgaaggaagttgtttgtttttcctccttttccttttttatattttctgaaaaaggaaaagagaaggcaggagaggtttgtccctccatgtcacggttcacctgccttggaggtggagtgtgggaagccttgcagtctgctcactcaactgtatttgactaggccgtcagcccctcagctttcacaagcattgaatatgtcagaaatctttcagagaaagtgtacattttaactggactgtttctggtttatatttaatgctgtttaaaaagcttcaagcatgttgatgtccaggaggctctcaaatgtgtgggctgtgcgactctgctgcgttgtcagtggatgtgtgattccaagcaattaggataggagacagttggtgcagataattcctggatctctaagaagcttggagtagtttgtaaagcaacctgaaattaaccttttctccaaatgggctgtctgtgcctggagtaggatttttctactgggtgtaccactttaaaggaatgactcttctggcaggtgtaaccactgatttcctttagaagattccatgtttattgcttaatttttaaaatggactgtgaaatgctgtatatgaacaaattattactgtgattaacatggtgacaattattttctgtaagtctgccttcccctggcatgttaaaaggcgaatgctcagctagctatggaggtgggggaagtagttgtcatatttccctcgtgagaagtcctggccctgcagagggaggagggtccctctagcacccatacttcctgctggaatgttgggctgggtgagcatggagagtcattgtcttcataccgttggtatgatccagtttgttttcacctttactactgtaagaagaaagaaagaaatgtagccataaaatgtatagaaacatggccttcaggtgcttgaatttattattttctcaagctaacatgtagtgaatgaagggtacaacatccatgtgtacacacacgtctccaccctggttggagtttagtgatactaaatgatgttttaagaagggacttgtatccttctaatttatagcctgtggatttctaaagaagtgtcctaggtctctttctcagctagtagcctcaaactgtaaaatgcatagcatctgaaaaaaaaaaagtatagcttaaaggagaactgtttatccttggtgccaattttctctgcataacattatttccagaaaattactgggggatttcctgtgaggaaagaggggatgggggcagagaattgacaaaaatgagtagagagcaagacagaccctcacgtattgaagaacagattctgtagtcttggtagctggcagaaatgttaagtgcttttcacagtcaacattcaaacagattatcagatggcatatttcaccctgttgttactttaaatgaagtgaccatgaaatcaacaaatctgctgtcaggtgcctgtcactaagatagttctttctgtcacacaatgcctcacatagcaggtaatgtgtttttaagaatcagtcctgtgtcacctcatcaagtccttgttaaaaagatgaaataagacggatggtgttgtgtaccatggagttgactgaaattcagtagaatgaaatgtatggtacacacacacacacacacacacacacacacacacacacacacacaaatacttcagagaaaacaaccttagtattaagactacagtctgttactgctttcttgtgggtctttgcttgtgaccttaggatcactgtgcacttttagttcttatttaattctagacttcaattaaattagattttgaactcactgatgaagactaggcaggttaggtttgtgccacgtggtgtatggttctgcagagtgaaaacacaaaactgacctaggatctcttgaacatgcttgttttccttccatgaagtgaggtgctaatttactgagctatatggagtgtcacagaatatttttgttgagttttcctcttgccttttggggtattctctggatgtttgtcgtcctgtctcagctgtcctttggcaaagtgctctcagtatttcgaaataataatagaaaaatcagaaatttttctgaaaaccatatgaacagtgcagtgagcacccacatctgtttgtatattgattgaccatggttttattcaatcaaaggccttattcataaaagaatacattttatgtgtaagtttcctctggtatattagtggtcataagtattatgttctccttgtggaatattaagtacaacactgaacttatatatcctacaacttctggtcagaatcattgatgccatggtgcaataggttttttttcttttaatactactgaacttgtgtcatctggatatagctggtagataattcagtagcaatcttgttataattttaagtcaaaatcccagaatgtcagaatatggattgcaatacaaggtagccttaattcatgcatgcatgagtccgtcccatcaatccaactctgagtatttatcatagagctgtaccaaatttggacataataaaagtaaataaatacttgctttccaggaattcagtctggtggtggaggcgggaaaaggattattaatacctatgggtgatacaaaaggtgtaacttggcctgagaatgacaggaaagactgcacaaccaaagtaatctttgagatgaatcttgaaggatgaacgggagttcatcagaaagagaggaaaggaagggtatgcatgccaaggcatggagagggaaataggcatgatatgttttggagaaggttgaatagtttggttggactatatcacaaggaaggttatgttccaaagacttcatttttgaaagatctggaaagggagctttccttagaacaacactaaagcatttggtgagttgacttgacatacagtagtcagagctctggtcacattataacgtgggtgtcattaggagagaatattgagctattaacaaatcagccaaaggtctttttagataagaacagtctcaagataattgctataattattacttactatggatattgctactactggtatttttttctatttatgttttgtatgtaagcattggtccttcgagttatctttagacttgtaaagatgtatttctagatgttcttccccaggttgcatttgtaatgagacttgcagctttcttcacacttccttacagcttggttgataaaaatcacaatttttattgtgtgtgtgtgtgtgagtgtgtgaaatattcagctagataatcacacctgtaggctcttgtaacaacgggagtaatatattttatttttttgaaatcactatgttccaattaccatttgaattaaaaagttgcaacattgggttgtcatttatgctgcttaaaggtcttaactatagagctatcatttgtagttttaaattaccgatcacgtctttagtattatctttaatgcatattatacttatggaataagttgacaggtatattttccttatgcttgtggttattgatttttccagcctttgacgtgaagctctgtacttgaatgtacgtggtataattagcatttttctcagatgttgtgaggatgactgaaacaaaatcaaatagaaaacaaaagccttagagagagatacgtagatataggcacaacttttagtggagtagggggaagccatttataattttattaactcatagacatttgaggttatgatttcctatcattggtcgttatatatacatagaattttggtggttggtcctttaattatggcatccatttagaatattctagtgtcttaaagtgtttattgggaattatggaacttgcttttcctgtcctgaaatgagctcatgaaaatgcatgaaggctcttgtcatttgaggtggcagggggtgtttttggcagtacaataagtttttccctataaagaatagctaggatggaacagtgaagtgtcggaatgcatggagatcagattaaatgtatttgaattagtatctctatgggttttatatctcaaagtcaaaatagtcattctcatcagataaaaatattcttgactggagaaactctgatccagaaacaatctatcatttgaatcccctgattgtaatatgaatggatattcaagttctgacacactgagagttaatgctgtatcccagcggtttattgaatcacagtgccatctaaagtgatcctctaagagagaaaccagtcagaataagtatttagataccaactaccaaggcacctcgctgtagtacaattcccagtggtggaatttgtaaatgaaatgtctatcctgctcctcatccaggcagtgctagttactgaagtgcaaaagtctttgctgtaggcactctttaaggtcctgtgaatataaaattgttatagtgttataacaaaaattcagtgtccattccatcagtagctgtgacagcaataggtatttgcggctaagaggccaattgaaattatttgatattatcctcgtaattactttaaattatcagaactttaaacttgaatcactctaccgtatcaaactttggggattgttacttaagtaatgattggttaccggaagtatcataccagagaatcatgttcactttgggatttcgaaaatagcaatctctataatcgtgacatatttttatttaagcatcccttttggtcacactgctaagtgtttttttaagctttgtttctcttttacctttcaaatgttatgcataattcattgaactctattcaaggtctgcagaggcaatatttccaatgtacatagcctaggtatggcatttttcttcctgttgatttatgttatttggatgttttctgccttttaaaaattttctttgggtttcaagatattatgtatggtgatggtgttatttgattgaacctaatagaccactttgtaaataaatatctagcttagattgttaagtgataataggtagaattttagatcaatccaaagggtttgtccaaaataaaatattaacttggtaacaattagatacaggctatacccatttttgttataaatatttattgtaattttcttccagaatttgttaattactaattaactttatttttccaccgtagaaataacaagattttcaaatcacatagaacagttaaaacactagctttcataggagctacacagactaggtatgtgaccttgagtgacttagctaaagtatttgaccttcagttggctccactgtgaaatgaggatagtagtgtctataaagttgggataagaattagagataacatatatgaaggacctgacacatggtgaggatcaatacacggtggtggtggtggtgattatttaaaattactcttttcagttggcctctgaatacatgggaaaaaatactctaattggataatagattatcatctaaatatagaatattatcgatccatataatgaatggtaagtctgcatcaggatattaaaaacatattgaatggattccagaaacacctggacctccagtttcacgacaatttgaataggaagggaaccttctacctttactatctaaccattagcaaaatttggcctggtttgctcactgactcaatcctaatttgtgttgaaagaaagcctctcttttaaaaaagaataaagagtaatatttccatgcattaatcttaattttgtggtttctactggctggctaatatttgttaaagactgataaaaaatagaaaccaaagtccatgctttcatgaggtttataatgtgcttgtagcaaacagtattcagtgaaagagctaaataataagttcatatcatcaaagggcaacatggcatgattaataattatctgtgtaaatactgtaggggtatagagaaaaacagagatgagagtgggcagtgagctgatgtgaggatgcttcttggaggaaataattgaagctattgtcagataggtaaggaaaatgacatctatgaaaagccacgctggtgggttgtctcagggagccagcaaacaaatgtttatctggaatttatgggaaatattaagtatttttaagacaaaatacaaaactatgtgtgaataaagatctttgtttgccaaaattttgaaattgtattcagtagataatatgtattagttgtaggtttctgagtaatagattctttattgtgtttccttgataccaaacttgagaatgaggtcattaaaatatggtgggaatgttagatggtaagcaggtgagagagtaatatagcaggcatgtgtgcgccaagggaggacgttttgcatgagattagaagagtgtgtcggggggggagtgtgtttgtgtgtgtgtatgtgtgtgtggttgggagggtagcagtgagagaaataagtaacctccatttagcaggattgtaagagatgcagagtactataggtgaacagggagagagagaggctttagttagggtaagagatacagtatatgttctgggaggaggttgaggatggagagagttcatcttcaggggaatggatgttagaggaagattcatcagtgggaaaagctatgggggtaaggtaggctggggtgaggagtagagatccataaatgaatgagagtaaaaggagaccagaggggttgcattttgaattttgttgagaactccagaagtgaaagatgtgcatgagacgtattagtctcaagtttcccaactatgacacaagagcagtttttgtgccagaactggctaggatcctagttggtgacagtgcctggtttattcgtttataactcaaggtatgtggagcaacagtgtctcaaaaaagtgaaaattgtaacttccttttgcagttttatagagcatgttcctgtgagaaattatcttttatacattaaagcttaaatttttctccattttgtcttttaagtagaattaacgattcccagaattatctcagagaaaatggagctcactgagcatttctgttaatacatatcagttaccttaattgcaaaattgtgcctcaaatcttagcagttcaaagtttgcataacaggtttgatatgaatgaagtcaacagatttttttaaaatcacgcgtgggcttctgtattgaattctctgctgaaatagatatcaccttggaagtggaaaatacgtgagcagcaatacatagatttctctttctagcattacctcagtttggctgtgcaagaagatcacagtactggagaagttacgtggcatcctgcagactcagagagacacaggccctgcagatttatcatgagttcagattgtacctcttgagatattacttctaagccctaaataatttcctttggctctaggcatggaaatctatactaatttctgttactatattagcctcagtgttgactaataaaattaatctcttttacattagacaagcccttgttatattcttatctggaccattgagtatcatgaggagaggcacaccctatcttaactaccactagaaaaaagttgcaggccctcttgtgcatgtgttagcataaagaaagcatgtcatgtactcttagagctaaaagggatgttagaggccagttgtgtgctctccaatctaaaacaggaatcccctctttagtacccccaggagtgagccagaatggcaggtattaactcaatctaaggaagagcagtcataccaagacctcagaattgtaaaggactgagctgtaatgtggttattcaagcaaagtatgggaaataagtggaaaaggaagttttaatagatcacttctaaagttccttctaaaattctgtaatttcgtaaagcatgctccttcagatttgacttcagtgtctaataggagtgagagggaagaaaagaatactagcttgctgaaggatttaaggaagccaaacaggttacagtgaaaaagaaaacataataatggggagcctagctttcccttttaagaacagctgaaatgataagtgaaagtatagtaaataactcttcagtgctattaatgattgaataacattagcttttccatggcagaagtatttcatcacagcacatgttcagagcacatataccctctattaggcactatactgagtgctttcgtggtactgttttcttctagtgatcccaactctatgaagtaggcattcttattatcccactttacagatgagtaaaccaaggcttaccaaggctaagtagcttgtttgaagccaacaaccagtgaatggaagggctagaatgcaagcccaaatgatatggtttggctgtgtccacacccaaatttcaccttgaactgtacttcccataatcctcccatgttgtgggagggacctggtgagaggtagttgaattgtggaggtggttacttccatgctgttctcgtgatagtgagttctcatgagatctgatggtttcttgaggggcttttccccttttgcttggcacttctccttcctgccactgtgtgaagaaggatgtatttgcttccccttcggccatgattataggtttcctgagaccgccccagccatgctaaactgtgagtcaattaaacctctttcctttatgaattacccagtcttgggtgtgtctttattagcagcatgagaatggactaatacaccaaggcatcagctaacagctaccgtaatatgaaccttaacaaataaaaggaaatatttatgcaggagaataccatcattcttaaatcatgcatgttgaagtgcaggggtaaaatttcatgatgtatttttatatgatccatgatcgagcaactccacttctgggaatgtagccaaaagaatcaaaagcagggtcttgaagagatgtttgcaaaaccgtccttataacagcattattcacattagccaaatggtgacaacaacccagatattcattgacagatgaatagaattttaaaaaaggggtatatacgtacaagggaatattattcagccttaaaaaggaaggaaattctgacacatgctacaacgtctgtgaactttgaggacattatgctaaatgaaacaagccagtcacaaaagacaagtactatatgattttgtctgtataagggacttagagtagtcagatttatagagatagaaagtagaatagtggttgccaggaactgagggtagcgaggaatggggaattgtcatttaaagtgtatagagtttagctttgcaacacgaaaagagttctggagactggttcacaatgatgtgagtttacttaacattactgaaccatacacttaaaaacagttaagatggtaaatttcatttatacctattttaccacaattttttaaaaatgtcattatgtttataatttaccttccattattatccaaaaatgtgtgtatgtgttcatgcttatatttttagactaagcagctagtgccaaatgataataattgctgaatcaaggtagaaggtatatggatatttactacaatattattttcactttattatacttctgaaatttttaattaaagttggggaaatgtatagtcataatggacaaaaataattacatccttaatagttaaattaaccaaatgatattgaccaaatgatatccttcaagttacaacttaaatcttccaagacattttctgactattctaattcctactaccttcacttttttaacgtaaataactactccttagaatccgtacagttatatcttccaattgtactgtgcacattaattttagttatctcatgctgcataacaagggaccccaaaatacgtctcttcagttaacagtgatttaatattgttcatggtatgcagattggccggagagttttcctgttagtcttacctgagattgtgtgacagcattcacctggcacatgggctgggcttgtcagttgagtgtgtagatcttcctgcacatggcctctctagttggatagtttggtctttttcataatagaggtctctgggtggtgagacttcttatgtggtagctggctttcaccagagcaaaagcaaaagttacctggccatttaaaggctaggcaggagctaacacagtgtcacttctgcccctttctgttggtcagagcaagtcacaaggccagccttggaaccaagggaaggcaaatagactctacctcatgatgggagaagcaacaaataatttacagccatccttagaccgccagatatttaaaactacaattaaaatgctgtctgatctatcaaatgatatcatataaattgtataatggcgagtaagagacagcccctgccttcaaagaaagttcagtgcaatgacagaagggaagaaggaaagtggcatgtatgaaggacctatgtgaggcactgtgctggttacttctccttaacaaaaagaattctagagtaaataagttatgattctattttactggttcagtagccgaggctctatggggttggaaaaaaaaatctgtcaatctaaagtgtacagagtggaggagtccaaccctaagttcacttttctttgtgctgtttcctctttacctgatgcacaggacaacctcccgcaaagctccaaatgccaacagggccaaggttgagaaacctcacacagagcacttgtcacattgacttatcagttttttgcacatctgcctctccagatacattatgaactttttgtgaacatgtttatttttcatccttgtgttacaagttcatggcacgtggtaggtattcaagaaatgtcctctgactgaatgaatcaaagccaaactatgaccaattccttatgggaagtataactaaagaagggtggagtttaagggaaagagagattccttcccagtgttcctggtcaatcgggaaggagtttgtagaggaattggggttggagaagccatcaaagaaagggtataatgttggttggtagaagagcactttgcagaaagggaatggcatgaacatcatttggggtgaaagaagaacactatgtgcttaggtaagagagttgtctagtgtagctggagcatggttcctgtaaagggagagtaagagagagggctgacaatctggcttggaatgacagccttgagaggatacatttctattcagtaatcagtgaagaaacttagaatgtttttgatttgggggaagatcagggttgttcttagaaggattccaacatggcacatgtatacatatgtaacaaatctgcacgttgtgcacgtgtaccctagaacttaaagtataataaaaaaaatttttaaaaaagaaagattgctctggtaacaaggtatcagagagaccagaaatacagactggttgaacagtcattgctcttgttcaggtcgtgagcatctcctccgacatgctcatgtctgaggcaaaaaggagaatgtggacacaggatgtgatttggctccccagatagatggcatgctgagtgaggacaggaaccatgatgtttacacctgtgtcacccacagcacctgacatggcagagggaagcacattcagtgcatgttcaatacatgcatgaagcagatgtcatttggtaagactaacttccatacataagtagggaaattaatttcatttatttctgggaaagtaaggcatgtatttgctgattgactaccattttgttaattcattgtttagtggtgggatagatggttagatgtatacacctcaaaaaaaattaggagatgacagtttgaaggattgagttcaagacaggctagaacatcctccagcctctccagctggtgcctccacgctgcatgctttccttgtcctacaaactgcagagaacattgcttctcagaatgatgcaaagcaccacactaagatgagtttctttaaccttcatgtatttattttgttatcagggctttgcacacctcccctagggtggaagaggtaatgaaattttagtataaaagacttcctaccagacatcagtcttcatgggggaataaaagtaaataatagatagcaaggaatatcaaccaatgattagagcccattctgcttaattagttcaaaataacttcaaggcaagattgtacagatttgtagatactctagagttgaccagtacagaataggattcaaaataagatggaatttatcctcaagagatactatgggctgggaaacaatgggaagtagggtgttccaggttatctttttggctttttcagtaactcctgaaataacctgggtaaggcatatctctatcgttattctccagtcccattatgaataagagtagaacaatgtggcccttatattctgcttggggaaatttgggggttaatatacatgatgtccgtaggcataataacacagcagaaagacagcatgggatttggagccaaactgcctcacccttggctttgccgcttcctagctgagtcaccttgaacagatgacttggtaggtcttagcctcagttcctcaactgtaaaatggagttaaagatcatcccagcgtttttgtgtgtggtggtgggttaatgcacatattgagcacaaagtaggtgctcaatatgtaagtctctaatataagtcactattcctattattattttatttaggtgtttttatgtaacacaaggcaaatatatagatgatattgtccagtaactggaaagttcttaagacacaggcaaaaatcaactttgttactagtctcacaaacaaaaattctgtgagtagccttgagaaacagaaaggatttagacagataagaggtggcaggcattccacaggcagctgacaaatctgcaggactgaatgagccagtcgggttttgtgagaagggaaggggcctgtgctgccagagatgggtttgctttgcagagcagtagaaatataagccctctgagcacaaggacctttgtgcctccatagcagctccctagtgtagtgccatgaatatggtagacacttagctaaaggtttattgatcaaattggaccaagactgatgaaaattactggcagtgataaaatcaagatgctcttcagtgaattggagtgccagcagggtttgatgctgtgaaatgtttctgattcccattgcctccgtcagtatcccttggttaaaggcatctgcccaggttgatgtgtcatggtaatagaattgtagaaggtttaattgtattttttaatctataaactggctgccaaattataagactggtattcagatctacttttgcattcctgagcaattacgtttttgctaatttttttgtataagtacgggtgtgtgtgtcctctgtgtatatatgtgtgttacatacatacacatttgtgtgtgtgtatgtgtgtgtgtgtgtgaaggtaaacattgttttaagcaaaattttaaagaagtctttttgtcattgacgttccctcatccttgccgttttgctaaatgtttatttttttaaatttctgtttttatagtcctgagctctctccctgttttcatctcgtttctaactaaaagtttttctgagctcataataattgatagataaaactacagtaggtgaaccaaaaacccaaagacggatagatccaaaggaatgacttggtaatcgtgaaatttcaggttatagaagaggtgttttggtgtaggacatccttccccttaggtggcattctactctgaccatggagatataggtactttctgcctatttgtatatctgaccctcttgataaaaatcatcagagatttttctgacttacctaatcagaaaatgctactacctagtactagaagttctgcctataaattaagttcctttcctctctttcataggtcaccatcacttctctctactaagacatagctcctcaaagaaaggggccatgtgtaactcatttaagtttgcctggcttacagtagcacctggcacatataggtactcaataattatttgttgaaagaatgctttacagcacatcagggtcgccaagactattcacccaaaggcccctctgggatagcctaatagactatgagctgttgtctcctttgtctacatattttatttacacccctcacacctcttctcttgactttacagagtgttcagtaatgttgtggacaaagaaacaattttataatgaaaataatctctttcctctttgttggatgtcttcttaatattctctgagtaatggttgttgactattaagaatgtcaaataagtagcagagaaaaatttttgctgagatattccaatcagtcattccaaacaactttttacctctactctctttggcactgatcacaatgttcagtaaacagttgaactagtgaatacgtggaagatggtaacaactttgtatgttatgtttcttataaaattttaatggggcatcaatgtatgaggaattatgtaaatgaggacacttagaatcaaggtgaagggtgtggtggaaaaggactcttagaatacaagtgtcacttgctgtaacactcctcatgatgatttcaaaagcatgggaacaactatagggagaaaagtttaccattcaatttgcattaagaagtaatgctgtataaatttagaggaaaaaggcttacgccatcatttagtaaaattaaaaattgctatagcttaataaatcattctggtataaattattctgcctctttcacttctcaagacaggcaggtagcctgctatcttcttcctctgtgaacctagtatccattcctgatataatattcccactctgttttttgtaattaaaacatcatttatactgagaataattaagacaactgtacatttgattttaaaatcagttttgagtattgtgccttgtcaagctacgagaatggttcctgcagcttttacaacgtagcattaagaagcagacagtgaccgcaggcacctgagtggaaggtttgacagtttgataaattaggaatgacagttgccaaaatggctgtccttcctgcagtctgccagtggagcatttgcacactgttaattgaattggcaatttgtgtaacagtgcctgcccctgagcttttgtaacgccggatctgccatttaactctgataatccaggacttgggaataaggacgaaaagcttcacatgatattactgcagatttaaaatgacagtcggggaccttcttgccaatttcccattaaatgagaaataattaacaatagcaataacaaagtcttataaagctggaaagttaaattgacttttcagcactagtattgtacaaaattgcttctagtgtgattatcggattgccctttcaggattatataccctaaatagtatcatatgatgaaccaaacgcagaaccgttttgcaagctaacctgttttattactgcgaaaatcttttgattatctacagggattgtgttgtcactaaaattttgttttatgctgtaagatttcatagcgatagaaaataatagagatttctgtttctttacttttgatagttaattatagctacagcaaaatttgaattaaaagttttatggagtagtatatatggctcttttggtgtccttctttgatgcttcccagaattttgagaactcctgaatacttgtttttgtgtgtgtgtgtgcttgttaccatcgtatttagagtaatgattgagaataatacagattctcagtgtagaattcttttaaaaattcaaaatatgttacgtgtccatgattttcaaagccctggatgttacagctcatcactgttattgtttgtttagttctaaagttgtcttttggggttgtgccgtgttagttatattagcatgaacagggatgatatttacctggtatactctgggtggccatgcccaccgggtacagtcatctgtagttaaataatttgtcactttcaactatatactggtatgtggatagcggctaggtaaggaatgaacaccagatcagcttgggagggtttgatgaaccaattttttttttaaaaaattaatttttaatttttgtgggcacatagtccatgtgtatatttatggggttcatgagatattttgatataggcgtgcagtgtgaaagaatcacgtcatggaaaatggggtatctgtcctctcaagcatttatcatttgtgttacaaacaatccaactacactctttgagttattttaaaatgtacaattggctgggcacagtggctcacgcctgtaatcccaatcaatactttgggagaccgaggtgggtggatcacttgaagtcaggatttcgaggccagcctggccaacatggtgaaaccctgtctctactaaaaatataaaaattagctggttgtggtggtgggtgcttgtaatcccagctacacaggaggccaaggcaggagaatcacttgaaacccaggaggtggaggttgcagtgagtcaagatcgtgccctcagcctgggtgacagggtgagactccgtctcaaaaaaaaaaaaaaaaaaagtacagttaagttattattgactatagtcaccctgttgtgttatctaataataagtcttattcattctatctgggtttttttttttttggtacccattaaccatccctatttctgcccccagctcctcactacactttccagcctctggtaaccatccttctatgataagccaatctgatggcaaaagatcaccttttcaaatattttgaagttattttttacttgagactttcagttaccaaagtatagttatattagtgttctttaaagtgtttgatcaagaatggagaaaagagtttccttaaataattagggtactcaagaataggatggaaacttctgttttatttgttatggtggttagaaaataagacagttgttttgttttttagaatttgctttttccccccaatgagtaaattttattaatttaaggtgatgataccttaatttaaggtgatggtgtgtacaccatcatacagtgtatgaatgggaagagagagtgagaaacaatgagccgcagtgcaggacagagacagggctcatccatgtagagattatatttaaagcctaaagctatagtgaaagggaaaaaagcagagagacaaagtattataagcattaacaattatggcttcagaagggagttgaagtcagtgaaggaaacagagaatgcagaaagaaatagagaacaggtggaaccaaattttaaaaacaaaagcatcgtatttggagtcagaacacctggctatttttatactttagctctgtcaacttcggcaagttagaaagtctttctagggcctccatctccttatctgagaaatggggaccaataaagcttgttttcgtttactttttaaatctcccaagctttttgtgcatgtgtgacaataaaatggattattatatgcagaaacagtttgcaaattatagaacgtgaaaatctaactgccaatgtaagtatcaatacagtaagagtataatttagagagaagtggtcaaaactttgaaaagctgtggcactggaaaggaaaatgaacaggaagaatgcccaagagacgtgggcaatgggaaatatgatctcttgcaccaccacaagagtttgtttctgatacaatggcaaagacagaccacaggttccagaaatttccagagatactgagcttgcaaagaaatgtcggtagcaggtatacatgacaaggcggtggtggacattcactgttattctcagaatagtggggatgtatgtgcaaagggttgatgagttacaagacaagagagggacatggcatggaaatgcctgcatttctgtaattcaaaatgtctctgaaattgtaaatatgtgttgtaattgatgtatatatttaatatgatagtgtttctttttttctgggcaagctgatagtaaattgatgacatttaaacattgatagcattttagaattgctgcaatttggcaaaattgttaatatagatatagcttgctaacagctggttttgattatttaattactcaaatgtttgaaaggcttctgtacctttcctcattcaatgttagatattattttattcaccacttactgaatgcactgtcatattgagtgcatgctatgtacgacacgctgtgctaaaagttgtatgtacgtgatcttatttaatctcaacacgaggaagtaagaattgttttagctccagcattctatacgaggaaactgagcctcagagcttgtattacttaaatacctggcttaaatacaaattacttaaatacaaattctgatgctaggttagatgttgtgaagaaaacaaagatacacaggaagtggtctgttcctctgggatatggtgcaggaaacttaaagcatatattcagaaaacaatcatgcaagaaaagatatattacattatggttctgtaaatgccacagcagaggcacaggcagtctagaaggattctaagaagagagatattatttccaactaggaaataaggggaagtttcttcatagacaggagtaaaatttgaacaggtagagatgagagggctgttattgcaggcagaaaaaaattagatgagtaaaagaaatggaagcattaaaacaccatgcatgttaaggaaacataaagttactgcagttggctggaccggagagtgcatgaagaggaatagtgagaaatcaagacaaaataattaatcagtgcatttcaaaaagataccacccattgttttattagtataattatgagtccaccagtaatcaggtttctttttttctgccagttgttttggttttatatctctagccacattgtaaaaccatctctgggattatagcagcttttaaatttcttctccattattttatgttttccaaatactcagcaattctattggcactggaaataatcatgatggatgtatttgaaaagtgtaatgggcataaaaagctcattttaagaagtttagtggaaaaaaacttattttttaatagtgatgttgagatatcattttatgttggaaactgtgggatgaaattgcctgagctgggccccaagggatccgagcatggttcctctcaggtatagagcttcttttgtggctgtggttattactttttcttttcttaaataatatttgtatctttttaattatgttttcttattgaggttaggcttatcttcgtattcttatttgttcactttattaaaataattttatttgtttttcctgttttttctctattttatttattgatgtttttatctttcttttccttttcttttcttttttttttttttttttttttttttttttttttttttgagacagagtctcgctctgtcacccaggctggagtgcagtggcgcgatcttggctcactgcaacctctgccttcctggttcaagcgattctcctgcctcagtagttgggattacaggcgcccgccaccacgcccggctaattttttgtatttttaggagagacggggtttcactgtgttagccaggatggtctccacctcctgaccacgtgatcctcccgctttggcctcccaaagggtttacctttattttctaccttttccgttcctttgggttttcccaattgtgactttcctgaattcttgagatgaatacttactcctttaacttctgtgtttcctgaaatttgtatttatagatatatatttcgctttatggctttagtggtgtcccacaaattttaacatagagtttttccaacgttactcctctcagaattgtttgagatatcttatttgatttaatatgtaactcaagatatttttagtagcatattatttaagttcctaacatgtaaggacttttttctctattttttttggcattaattttactgctgtctggacattccttatcactcaggtaaatgttaccatcaaaactccctaaattgatagctcaggtatgatgttttgctacttgccttatggaatggacatccattcgcagagcagatagttgttgagcatatgctgcatggcaagccctgttgtgggtaaacaagaccaccctgcccccagccccaccccacctgcctctccctgctccctggctttcatgtagctggagtggggtgggaggaacagacagcagcgaacaagcaactgcgctaccagcatgacttggggtagtgataagtacgatgaagaaatgaagcctgtgctgttgtgatggaggtaacctactagggacagatgtgctacttttgactgggtggcagtgaaagcctctctgggttggcgtttggattgaggagcagaaggagccagccacaagaagtctggagacaaagcagccgaggggaagcagcaaacacagaaattctcaggtgaaaactaacttggtgtcttccaggagaattgaaagaaaaaggaaccagtgtggtttgagagtaggaagtgagaggatagtctcagaggaggttggtggggtaggcaggggcacgatggggtaggcaggggcatgatccttcacccttctaggacagggtgggagttgggttctatgctaagtacgatggagaagcccttgttctaagtacagaatcataataaacttttagtaagtaagcccttttcataagcttgttttgaggattaaaagtggagtgtgtgtgtgtgtgagagagagagagagaagtgcttaaaacaatgcctggaacatagtaagtgttacattaatgtgtattactgttctgtagcaatgagcagtcttttatcatccctcgtaaatgctttgacacatattaggaaaaataaatatttacctgaataaataaaaaacacactgcctggactttgggaggccaaggtaggcagatcacttgtcaggagttcgagaccagcctggccaacatggcaaaaccccagctctactaaaaatgcagaaattagccaggtgtggtggtgcgtgtctgtagtcccagctattcgagaggccaaggagggagaatcacctgaacctgggaggcagaagctgcagtgagccaagatcacgccactgcactccagcctgggtgacagagtgagacaccatctcaaaaacaacaaccacaataacaacaacaacaaaaaacactgcacgaatatgcttactctacctcttccccctcccctttaaatttgttggttcttaaaaacatttgtgttctccaaatgaatgatctccagattcattttagtgcacttcctgtgggaccttgggcaagtcactcttacagagctgttgtgaggattaagtgagataacgtcaagcagcaggtgtaatgccaggcacataataaacacttgggaggccatattaatgatctcgttagagttcagtacactctttaagttcataatttcttaaatttgcaatataattatttagaaggctaactctattcactgtgtactaaatatctgaaagtataaaataagactaaaaattacttttctgtctccataggtgcatttttatagttattggacgtctattccagaggccttctcagaggccggcagataaattgatagtcacttaacattcactttggagggtcagggactagatttttatggaaagcattaattcaaagagtctgtttttcttggatttatttgtttgtgaggacaaagagagaagcttgcaatttataatttccattgagcagtgacctagccttaaagagatgttttacttatttataaagaataattatttgctggtgtgaaggaggaatgcattctaatgaaggcatatattttaaaggttgaggtggaaaagaggaaacaaaagttgccaaaatttaaactatttacacttgggtgatttagtgtgaaggagataaaacattcctcaaactggtatagtacttaggatagcagtgagctgcgatttataataacgttttatatgctgcatcgtaactcttgaaattcaagcttgtaaatcaggaatcatcttatcagggtaagatctcatcagtaccgagacatttttaaggctataaagttgttcgtaatttatgcatgtgaatataatacatgtgcaagaaaacttcaactatctggaacttaaaggaaattattttggataaaggggggccgcttctttaatcaccaaactttttcttttttatttaaatcattttggaaagaattttttgtgtggaagataattgagccttttctttatgacttagcagcatcattatgtatgcgtttcattaccatgaaaataatatggtgtgatatccttagggaccattggactatgagaacagctttgactatataccaaattggcctagattatagtgccttttgagggcttttttttcctgttgtttatctccccccaccgcttttttctattcccccttactgtcagctataactcctcggtgctattactgtttctgggactcctctttaattcgctgcttcagatatgctttcagctgggacacctaggtttgttggaacaatatataagctaagcataaacaaaatctgacagaggacaaaagggcttctctatgaataaaatatttgaacatgatgacatcatttttgactcttcagagagacttttcacagttttcttggttacatctgcattttagatgagtaaaatattcttacgtaaggcccagggccacgctgtagaataagttaacttgtctgtccatatgtgtgctcttggaagtgtgtttatatcggattccctgacctatagtgatactatgccaagacgaaatgctcatcgtaatgatacctttagaaacctggggaaaacacctacttgtctaatttcctttgcagtgcttgctgctgaaaattttttagcctacgttttttagactgaatatgtaaataaaatctttgatggttctacataaaactttcagggagcaagcctccccatttaaggtaatacaaggttctgggtactccaaactttaaatgtaaacaaaattattacggtagtaaaattcccaaagcgattttatttctttcgctcactaaatttcttagtgtggttcagttgcttggcttgacctcttaactaaaataagtttgccggcatctctccataatgatacttatctttacaaagataaatatggccgtatttctaaaaaattcagattaaggatgtaggctaccaggatttatgaagactatttttcttttcaaatatttgatcagtatcatggaatgtagttagacaccttggaaagccattaaatagaaatacttcatgagttttaggggaagaaaggcaaatacatagaggacagtgtgttagatgtttcaaccatgtacacaactgatcatttggggccagggaagctgatttttatgttttaaaattaatccaacgtagattaaccatgtcacgtccccttaaccacaggcgtatgaatctcagggtagacagctgtttggatgtctcatactgggactgctgccctcaacaaacgcttccgatttttctacatggtcacttggcagcatctatgtgcacccatatggctggatggcatcatgcctgtttacaagtcagttgaattgtttcactaggacccaggtgccaagcaaacacgggttggtctaactggctcctgaactatgcagcttctttctcagaaataacaacaaaaaatcctttataatgacctgcaaggttatgccaatatatttattggcatttcattgctttccctaacaattagatactttgtctgtaaagacaacaaaggaaagaagaagaatgcaattctccttcaattactgagcaaataatacagaatgcagcaaaatgtacagatttgggctgccacctgtggctgcaatatgcatacaatagtcagagcatctgcagtcctggttgaagacagaaaacagaatggggcattggtgggtatttcatgttgctgagactggtcatttaacttttctttttaaccagtttcactatttgaagtgcaaacagtagttttcacatcgaaattttgaacataaatgagatgatacatatgaagtgttctgagtgccttgaaataattttatggatttatgtgtctactatatgctttgataaagaagaaaattgtgcagttgccctggaattagcaaacagatgtttaacattttcatgatacttttcttttgctctttctaaagagctgatttttatatactactttaatttataaagcacttttacctatattgttatatttagttcacatgcaaaccttatgaagtaagtaggtcaagtattatttttaatttcattttacaaatatggaaactagggctcagagcagtattttgacttatcctgaggttgtctaacaagtttaaatgagaaaactgagactcatacccagacttttttttcctgggagtccattgcatttagtatggaagaatccttgagagagtgtgctcatttgggtggattggtttcatttcattattaagtaaagcctccaaacagttaagaagttgattgaaaaatatataacatactcaataaaagttacttgagtagaatactctagatgtgacataactaaatctgtatcacttctaactaattcccacttataaacactggcatggcttcaagtccattttattgaagcaatttggaagaaatcagaaaagtcataagtaaaggagttttgaaggagatgtggcctcatttgactataattttcctcttttagataggatatgtgtcaaaattctcccctggaaaattttgaatcaaagtatcatgtaaatggaagagagaaatcttaggtagattataaaataaattcttaatgttgaatatgaataaagtgttgaaaagttgacttgccattgagtcaatgtttgacatgtgaatatttggaaatagaaagtcagtatggcaggttcactttgtcttattattagcacagtacaaacatcctactgttatgttcatatttataatagtgttttattatgacctcttttttcacttttaagagctttgttgaagtatattttatatactgtgcaattcactgattataagtgtatggttagaaaatttttagtaaatttatagttatgcgaccatcaccacaatccagcttttaaaacacttccatcatcatataaagttccttcatgcctacctgcagtcaatccctgcccccaaccacaatcccaggcaaacagcaatctactttgcatttctctgtagttctgccttttctagaaaattcatgtaagtgtaatcttataagatgtagtcttctgtgcttgactgcttttacttagcgtagtgttgtgggggttaattcaagttattttatatgtctgcatgttgggggtctccagtagtcttatttaaccaggttccccagggacatctttcaccttcagtctgattcgagtcaaagatgagtcttaggcaccatctgatgttcaggcagtttattctttttacaaaattttaattttaattttttttatttcagtagaattttggggaaccagttgtgtttggttagtattggtttttgagattttggtacacccattgcttgagcagcgtatactttatccaaagtgtagtattttatccctcgccatcccccaacctttccccacagttcaatgtatcattcttatgtctttgcatcctcatagcttagctgccgcatgtgagtgagaatatgtgatgtttggttttccatttctgagttacttcacttagaataacagtctcaaattccatccaggttgcaatgaatgccattattttgtttcttgctatggcttagtggtattccattgtgtgtgtgtgcgtgtgtgtgtgtgtgtgtgtgtgtgtgtatcacattttctttatcctattgttgattgatgggcacttgggctggttccatgtttttgcaattgcaaattgtgctgctgtaaacttatgcatgttcaactatcttttttgtataaagacttcttttcctctgggtagatacctagaagtgggagagtccttaaagaactaaaagtagatttaccatttgatccaggcagtttattcttatagtgatggactgcaggatcaggtttaaaatggcatgggctaggtacattcaggggtcaaatgactgcctgactgagagtgtctcttggtagtaactcttctcagagtttgggggattctccctgcttttatacccatattgagtctgagtcagatgtcaggcattttgtttgtaagagaatttaaactattcttgtaagataagctttaaggttcctgaaagttgcatctgttccgaagtggccttgtctccctccagggcaaggagagcttttaggttctgttttcataaagacccattaatcccctggtcagggttggaagttcccaggccagtttgcatcatactgctaagtgacacatagtttaggccttgcgggacgtttgagtgggccttttggctgttagtaatcttggacgtttgagtggaccttctggctgttagtaatcttataatatgccccttatagcatactacagtccatagtttgttcctcttattattgctgagaagtatttcattgaatggatgtaccatgttttgtttatttatttaccagttgttggacatttggattgtttctgttttgggttattttgaataatactgctgtaaacattcatgtagaaatctttgtgtgaaaaatgtgtttctgttactcttgaatagatttctagtagtgaaattgctgagctgtgtggtaaacgcatgtttaatttttaaagaaaatgcaaaactttctaaagtcatcagatcagaccattttacattctcaccagcaatgtgtgagggttccaggttttttgtcttttattatagccattctatttcatgtgtactgttatctcattatggttttaatttgtattttctattagtttttctgttgctgtgtaacaaattaccacaaacatagcagcttaaaacaacattctttttattcacagtttccatgggttaggaatctgattataggttaactagggtctctgtacagggtctcactgggctgaaattaaacttgcatgggactgcagtctcatttgaggagttcctcctccaggctcactggttgttgacagaaatcaattccttgattttgtaggacagaagtctccattttctttttggctatcagctagggactgctcttagcttctacaggccaccctagaggggtccttgccttgtggctccttccagaggaagttcaccacctggttggttgcaaaagaatccttctcacttttattctctttcaggaaatacttggacccttttttaaagggcttacctgattaggacacctgccaaggatgatttcctttttgattaactcaaagtcaactgattagggaccttaatcacatctgcaaaatctcttcacccttgccacattatttaacctaatcctgggagtaaaatcccatcctattcacaaatattgcctacactcaaaaagaggagatgtacatgatctgtactccagagagtgagaatcttggaagccatcttagaattctgcctaccaaaattttgttaatgactgatactgtggaccatcttttcaggtacttattagccttccttatatcttctttggagaaattctattcaaatattttgcccattttttattgggttgtttgtctttgtcttattcaattaccaaaggcctgtatatactatggactcaaatcttttgtcagatatatgattagcaaatattttccccagtctgtggcttgtgttttcattttctcaaaggtgttttttgaagaacagaggttttaattttaatgaggtctattttgtcatttatttcttttatggatcatacttcaggtgtcatatcagagaaatctttgcataatatgaagtcaaaacaattttatgttttgtttcagaattttacagttttagctcttcagtttaggtccatgatccattttgaattaatttttgctcatgatatgcccaaaatttactcaaatgtccatgtttgtttatttatacttttgacatacatgtatccaattgttccagaaacattgttggaaagatcatcttttttctattgagtagccttgacacctctgttgcatatcaattgactatacacatgaggttttgtttctgaactctctcttgttctattgacatatgtagacacatatgccaataccactttgtcttgatttctgtacctttatagtacattttaaaatcaggtagtgtaagtcctatgactttgttctttttaaaaattgctttcactattctagattatttgtattttcatacaaagtttaggataaatttgttagtttctataaaaattcctgctggaatttttatagaaattccactgaatctatagatcagtttgagcatatttgctgtttgaatactgagtctctcaacctgtgaacatggcatatctcttatttatttaaatctttaaaaatatttatcagcaatgttttgtgtcagtgtacacacaggtcttgtacttttgtttgctaaatttattacttatcagtttattcattttgatgatcattgtgaatagaatttaattttcaaatatttgctagtatattgaaatacagttgattcttgtatactgatcttttgtcctgaaaccttgtgtaactaacttgtggattatttctaggaatttttttttgtagatttcttaggttttttttaatgtataggagcatgttatctgtgaataaatattttactaattcatttttaatctctatagcttcaatgtctttttcttgccttattacattggttagaacctctagtacagtgctgaagaaagagctcttcaaagagcaaactggataacttttgatgtagcttcaaggcaaaaggggaatcacacctgttgtgtgagttggcttcttagatataaattttatttctgaatattttaatgataatcttctgtctaagcctctttgctttcttcctaagaattgtgctgaatctaatttttgtgttaacaattataaaaacatttatgggggaatactggagagttctttttaagtcttagccaagatctcagtggttccaaatccatagagatcgttgttgctttgtgtctgtaatgttactaactcttttaggtgtgttttggtatactatcataacttgcagttgattacggcacatttgtctctcaaatcttttccttttcttttctttttccaaggaagaaatgaaaggcatattggcctgaaagtcagaagacctgaaatttagttgctagctagctgtttgacttttggcacatctcttgactgctctgaaccttttttcttttttctatctgcgtagtaagataattcttatactgcattattaaagaccattctgtgttttaacattttatggttatgagaacatactatttaatgcatcttaaataaaattaatctttaaaagacttttaattcaaatttgtttgccattatacattttattagggaattgaaaaagctctaattgcagaagacatcccatactcaaacaaaaattctttacaaacagtatggtcattaataggcaaaatttaggaatttgcattaggctttctgaaaaatcacatattctgaagctcatacatcttctcttatttctgttaataataacataactcattattgcaagcatcttcaaggaactcaccaaagttattttgcttactgggattttgtgccatattatattttgtgagtaataatttttcagtaacgtcgaattttgttttaattgtatttgtgtttggcctaacagaaattaaccccgtaattaatgtgtaataatacatgccataaagttttctgttagcctgccatttatttattattgttacgctaaatgttattataataatgataaatctaaatatagcacatgattgcatttcaaccctgattcaaattgacctttcaactgaagagagttgtgctgtctcatttaagatgacaattataggaccttaaagttctgggggtgatctgttttattttcctgggggtggggaagcagtgggcaaagcacagtacagcagcatcagcttacagtgtttagcagtagctcagctttttcaaagcctcttttttcaagagatgctaaaagggtgttcaaaaaagatgaaagctacatgattaaaatgaagcatgccataatgtttaactggcagtttatgctacatagtctatatactctggtctaatcatcttgtattgtgtctgactagtttatagtggttgaaagtttcttggccagaaaggaccttgtaaaattagttcttattagaaaaagtatggatggctgcaaaatttggagacaggctgattttagtcctgtcaaatgacataaataaataatcagcatgacagttgaggtctaatttggagaaaaaaaatcaagtggtgtttgtctttagaaattcctaatggataggattcccatcaaagtagcatttcagttctttgtttagatttggccttaaatccatgttttaagaaaatctaatgtctatatgagtgtatgtttaagactttatgtgtaatatatgacacataaaatataatatattgggatatttaaattaacagtatccaggatatcagtgtgtaaaatttaaagtcataaaaccatgtgaggcagagacaacaagtttaactattttctttccatctgatggttggactggtttggttttggcatttttagtttttttattcctattggtgatacctatggtttccattttttgaataaggaaacatatagttgttttattcatagcttattacacagagtgagcttatatcagaatagtttttggtttttatatataagatttgttcagtttcttcttaagtatcaatattttttcctggctaggcatagtggctcatgcctgtaatcccagcacttcgggaggccgaggcaggtggatcacctgaggtcaggagtttgagaccagcctgaccaacatggcgaaaccctgtctctactaaaaatacaaaaattagccgggtgtggtggtgggcgcctgtaatcccaactacctgggaggctgaagcaggagaatctcttgaacctgggaggcagaggttgcagtgagccgagatcgtgccactgcactccagcctgggtgacagagggagactccgtctcaaaaagacaaaatttcctttaattttgtgtaaccattttatattttgttaatttattagttattaacactgcccactaccacttgaatattatttataggttaaatgataaaacatgaaagtacccaaatacattgttatggtgaaaatgatgagagttttctgaaagttctaaatttttcatcctaaaacacagccttccccgatcagctctgtaaaattctactttgacatgctaatgggttgtttctacagatacagttttcctagatagtattccttatatcaattatccgaataatctttagactgttagttcaaggtgcttgcgaaagaaatctaaaaatagagcaaaaaggaaacagttttattcttgtgatcttacgtaaaaattattgtgtcttttagtgaaagagccataccataccactgtcaccttatactaaaacaaacaaacacaaaaaagaacaaacaaatatacagatgttccaagatattttatttcttggttgctttgatctcacttttcatgtgtagtatgtaatacatagttgaactgtgccaaactctacttcaacagggaaaattttctttggcctgtaaattgcatgcatgtgttacttccaattaatctttataagctagtgaaagggaatgtagtggctttgatagtttgacagttttaaaaacaaattatcttcaactagatcaacttctgaaattagggaagccacacgccatctcaaaactatacattttagtggtacctgctgagttttgggtgtttataacttggccataaaaattctttccagcctgaaatctaaagtctcaacccagcaggaattttaaaacaaaatttacctaacgttatttcttttttgttctgtaagaacagaaatagaaagcttaaagtcctggacatgactttatggaaaaattttatttttttattttattttttatttttttaaaccaaactgtgtaggccatttgtcgtgctatggactagtgtccttgtaaattacagagagggagagggagagggaaagggatgcgggagggaagtggggatggcagagtggggcgatctgggtataaatgggaagggctggttcctcacaggcttattgggtgaatgcgtttttgattaggaaatgcagtgatacctgtacttttaggctgtcatctgacaggtgttgattggctacactgatctctgtagcttcttgtcttgggttctgtctatgttgctctgcatcttgtgttggtttgagaaagattccatgtagcacagttaggtccataaaaggtaagaaataattttggagagattagaagggttcattgaaagcacttgtcattagtttaattttggccacttcagaatcattctaagtaaggttctcttaagcatagtttatctttgaagtccttttttaaaatttcagtcgtcgtttctggtttgttactgtcttgtatgccattccgtacctcatcacgatgccctgggagacaagattttcctatttcctctcttccttggtctaatccccaacctttttctcactttcagtgtcttccacgtgtcctgacagaaatattgggtctaacatatcgcaaataaattatttttaagggagggaaattcatggagacacaaaggggttgtaggacagaagaaaaacagtttggagaaagagcttgtggaagccctctgtgtgttgaggtgatcataagctgtgaattgcccaggaacagttcttcaaatagaactgcttgttatactgcccaggaatatgggagacaagggtgtcagaggcaaaactgcttaaacctaccagtgtaaagctgttaagtgtgcccatacatcggtggccacagaatgtgtgtggtcctgtttgcagttcacctttgcatctgttcctggagcaatgtctcagatacctgcaagcaattatgccatttggataggttacctggtgtgaagctcctctggcccagcctttccacatggcaacctgctggcttttatttctctgctctgcagcaggtcagctttaacatctcaagggtggttttgcagagtgtgaattttaacttgataagcctgtgtgtttttcataaagtgtttgcacttaatgtattaacatgattattttataaattgacctgacatttccattgtttcctccttgtattatcttgctttggtgcatgctttaatagtttttataaagtttattgccccctgctgctcactatcttggtatgccgtgtgttgttctttgtatcctgctggggtgcagtttaatgaattatttttcaatgagaatgatatgatttttactgcctgcccacagagatagtgattttaatatagtatttgtttattcactaccctctcccattttttagcccatatgtgtcattattactagtatctgagtgtcacgaggcattggctgtccaagctcaatgccatgcatgtaatgtctcttttgttgcatgtttaattctttatctcttctaatcttctccctggatttctatcttcaattccatttcagacagttcagcttttatgccaacatctgtacatttgctttgcattgaaattccgcaaataacatctttgctgctggtggtctcttgctcagtaattgaatccacacatccctaggatgtgttttgtggggtgatttcgcaactttaggtctttgtcaaactggggcttatttgaaactctattgaaatgagtcagggtttgttttgtgagcactttaactccctcctgctttctttttttctcatcgtccccaacattacagcataactgttttatcttgatctgattgaattgtagagattctcatttctatttccagaaatgtagttaatgtttaggtgccacctctgctactatatccaattcctttccatttaatctttttcccctgtatgatttctgtacatacatcaccatcactctcttttctgtctggccccctaccattccatgttccccagtgttaggcttaagtaaaataatgtcggcattcatgacaagggatatctcaaacctggaatgcttctggaacattcttcggattcagctccttaaatatttaaaatgttccagtaattagggggacatcttgatatttgctaggcaaggtctcgttcgtggtttgaaaacaaaatctaccaggtatatcatttaaaatatatttggctgcaaataacagaatacgtaacatgcagttgtataagcaataccgtgatggaattatccgtgtagaagtttgtaggtaggcagccctaggcagtgcagcagctcagcaaggtcagccaggacctaggtctgctctggcgtcctcagtgcattgtcttttccactcaaaacttgtcgcctcgtgcaaatatttctggtagcaccaagtgtcagatccttacccaatagcttttaaggaaatgtgaagaagtgtgaaggattccctgaaagttgcacaggagagttccctttacgtgttgtgacgcagaactgggtcatattcccatacttagagtgatacaaatatggggggatgaaattagcatgagtggcttaaaactgattattattcatttcccagcaatgagcacattacctgcccccaaaaatgatgattttctttgcaaaggagagaggatagaacaacaaacttggtttcttttggatagacaacatatttacgtaaccagggattgaaagatgttgaattaaaaaatgacaaattcagtttcatgtgtaaagattatctgtattcttatagaataccttctatttgcaattagttatttcactgtgggaagcatttctctttcaacccagtgacatccatattttgacattttcagcatggatagtcatgtatatgccataatcagtgctgtgtttctagttgaatttcatttgctgtaatcccaatccaaaagcctgtaatctccatgaaggcaggaaccatatctctttttattcctaatcatttccttaacaccaactgagtctctgatcatagtaggtgatcaatatgcactgtgtaaatgaacctcaggcttatggaatgacattctataccttcatttttaactcttattacttgttcataaaataaaatactgtatactagagttgaaatttaacatttgaatcatataataaagcaattttgtcaatttatatctctctttatcattgaaaaaatttaatagcgtacagtttcctcacatgccttttataagtcagtaggcaactccatcccactcccctggaactgctgtaagaccagaccatttcagttaatgccatgatgcaaagccagaaggagagaaggaagtcacaggcatcatgctgttggtgtgtgtggctctgtggagtcaaatgtcaccctgcctcccattcctcctggatatgcaactggaaagggcaagtgcaaggatagtgaagggcaagggtcaccagtgaagggagtagaaggaaattgcttgcaagctccggtctacaacctcctttttattccttctcacctggtcaagtggttaagggtattgttaacagggatggatgtggcaaaggagtgtgttccagaatatttccatttttccaaaaagaacacaggaataactaatttactctaaacgtaaaatacatcaaactaaaatacacataaacctcacttaaacctgtgcaaacttatcttctaaacttagcttttatataatgaaacttgccctaaaagatatgaaccgaatgtgagaggcaaggggatgaaaatctggtttcaagggcccaaacatcaaattgccatttgtgctgattttcagatgtgatttaaaaataaatgtagaatgttcaggtcatagatattatggaagctttttattgtaatcctagacaaaactttattatgccactaagaagtcaggagtcttcagtgaaaattgtagtcgacaggaaaataaagtcaattgcactgaaagttaagaagtattctaggtcaggagatccttatatgtatcttttactttagagtgcatttatagcccatggaaggaagtagattgatattcttgaagttaacttccttttcttgtgttcacaaaatccgggttagccaggtggaaggatacagaattaaacttttatgactctgcctggagcacatgagctggtgtaactagcctaaggataaatgtgcagttcaacagacaagctgccctctgctgagaccacaaatttttctcccttgtttttcgcatatcagctaagtacttacataaaagtatctcaaatgatattggttctgggaatttcatttcattcttcactagccactcttagttgcctgaaattgatcattatcatcatcaaatatctatggaaagactatgggatacatagaagtgttgattcagggctgggcacggtggttcatgcctgtaatcccagcactttgggaggtcgaggcaggaggatcacaaggtcaggagttcgagaccagcctggccaatatggtgaaaccccgtctctactaaaaatacaaaaaattagctgggcatggtggcacgtgcctgtaatcccagctgaggggaggcaggagaattgcttgaacccgggaggcagaggttgcagtgagctgaaattgagccactgcactccagcctgggcgacagagggagactccgtctcaaaaaaaaaaaaaaagttgattccggtggtacagtggctcgtgcctgtaatctcagcactttgggaggccaaggtggggggattgtttgaagctcaagttccagaccagcctgggcaacagagtgggaccctggtctctacagaaaacagaaaaattagccaggcatgttgtcacatgcctatagtcccagctacttgggaggtgaggtaggaggatcgcttgaacccaagaggttgaggctgctgtgagctttgattgtgctactgcactctagcctggatgacacagtgagaccctgtctcaaaaaaaaaaaaaaaaaaaaaaggaaatgttgatttcaaattaggataatttcaaatgtgatctttgccctcaagaaaattaggatgtattagttagttttagaaacacaaatgtttagctttcagtttataaagccatggggaaaaaaagtgttaagcagagcttgagttcctaggtgagtccgcaaagcctgtatacccatcatggaacccagtgataaaatggagaatcctttcatgtattacagttcctgggaacaggatgccttatggtcctgaggcaggaggaaatatccttacctcatctgggcactaacatggtgggaagctgggaagcatttcagaataggtcaatattgtcccaaatacccttccatcaatgttgctgatgcctccttacacctgccaatatgtttcctccaggccacaagtacccatttatcccaaggttactccatgtccaccatcttaagtctgccactgggataagggagataaaataacctttaccttgaaagagttccatgctcaaaaatgctcttttcctccacattatcaaaatttcaattctcttggtacagttcagttcctctagggattaaaagaaaagcaaactggtggcatcaattcatgctgcttttgtgaattattaacaatctttttacctactcaaagattcactttctaaacaagtatgtttgctaagtcagacaaatttctaatggggttatttgtataatatcagacactgtatcaaaaggtaaggaaaagaactcacaacatctattaaatgtttttagaaagaccactcgtaaatatctattggcactgtgggttgtaaataagaatagtcatcacaaattaaaatgtggacacacacacacaagaaaattatgaacaaaatataaaatggctgctagaacagtgtggaatatgttataagtgcttaaagcagactaagatgcttttccaactattcattgccggagggcttcacaggtgtggctgctgaatgaggaatgacaggatttgtataaaatgagttgagggtgacaggtagtcggagcccagagaatagtacagcccttccttggtatccatggggaattggttccagaatctccccacagataacaaaatccttggatgctccagtccttgatataaaatggtatagtatttgcatataacctaggtacatcctcccatacactttaaatcatttctagattacttataacacccaatacaatataaattacatgtaaatagttgttacattgtattgctcagggaacgatgacaaggaaaagtctgtacatgtttagtgcagacacaaccatcctttttttttttcaaatattttcaatctgtggttggttggatctgcagatacaggatcagccaatgcagagggccaactctataagtaaaagcagcactggaaagtgagtcagtaggagcctgtcttccaggaaggtccctgtttctcaagagttcttttcctgcagggggagagagggttggatgtcaaggcaggaatgtgtggagtatgctcacatgtggtatccttgaattcacctaacaaccctatgaacaagcattttagagaggaggaaatcaagactcagcaagcctcagtaacttgccccatatcccatggttgctaaatagcaaaatcatgattgaaatctcaacctgcctgattgtagaacctgaactcttcttgtcatccagccgctctctcccttcccaccatggggacccctcagcaccagcaaaaatgagggtgaggaggcagggaggatggaaccttcttaagcataggtaatttgtcagttgaaaatcgcacatggataaatgtctttaaaccctatgtagatagggaaaactcttgatattactgaaaagtaatatcgacgtagcaaaccttctgaagagagtgctagtcatggaacccctcatttggaaactattagaacaagtgaattatttttaaccatcttttagaccattcagaaacagagtgaattgtccaggacaagattgtttattttttgaaaatgtatccagttttgtctgttttttaaagatcttcttggtagaatgtggcagaattctactacaaaagctcctttgttcacgtagtagttccagtgtttccagccattcctagagcccaggagccatgccaaggcctggagctcccgttcacatctgtgcagttacacacagagaagcttcctcttctatggggttgtaatcgtttatttacttgtcattagggatgtcgcaggtttcctgttttgggaagaggtgttcagggttagaattttattgagggagagggacttagtttggtgtcactaaaatgcctccatttggagttaggtcccggctccctcctgtcatttcctacttgagttttcacttttgcccttgccagggtcctctcattgcccgtgagcccttccaaccacgagtgggcatccatcagaaactggaggaaccaaacgagtacaaaagctcatgggggagttctgttgaggacggaggtcagaagcatgtttctaggaaaatgaaatgtggggattaactatggcttttctttatttaggctaaccatgtctataatgtcataattaggacgaattctctgcacttgaatgtgttggtaggaattttattgtcaaaaatataacttaaatgtttttcctagcctatttatactgttaaaaaacagtttcgtccagaaatggaaatagaggggtaggtccctgaattcaaaccaggctactaagagacattatcgtcaaattctttctatgatagaattatttcagttgcttatgaaagctgaatatgtgtaatcatctttccagacctggttgaccgtattttatttaacaaattaactagctgatggaccaatcctcaaacaaccatgattgttattaaccactgaggtttttgctgatctctggatgtctctcattcaaattctaagaagtgatttttcatcatcaaagagatttgcagtatcattatagttgtttctgctcatcaactttttgattttttttggcttgtttgaaaactattctgactggctactttgttccttttttgtcatttgatagtccactttgttagttaggaaaccaaatcattttgtacattacgagtcacttgcttattagactcacttttgttggaattgaatttgtccttttcccgtcctgatgggaatatgagcttcctgtgttggatccctgctcaaagggagcgaggatgctagtggcataactggagggagtacctttatatccttttgtacagtctctgggcggaattgttgaaggacaggaaattcttctctagcaggagaagggcgtctcccacttcggtacagaaatctcacactccgcgtcctctggcacatcactgagtgctggagagcacgaagccagtgtttactgctggtccttgggtgttaagcagccctccactgcttttattgtaccattaattgcacttaatgcagctgcatttctcgtacgcttggctaggctctgaaaattaagtagagggtactttgttatcaaattcactgtaatgagctctggtgggacagggtccgttaagtttgaaattacctcgggccatttctaaaggacttcttaaaatagttcacatctataaaagtttgtaactagataaatagccatggagagtgtaagaccaggcagagggaaatccacatttctcctcagtgcatctttgataaaatatggatgtgtagaatatttaagagtcatgtttattttctgcattctcctctgccttccacatttgctaaatttcagcttttaggccggcagtgtgtgcattcaggtttagttgtttcacaccatggtttatgcatacagactgcccccctacctgtttgcttccttttgaatccaaatcgtacattaaactagaataaaaagtaggacccccctctgggtgtatgcaaattggttcaagaagggatcacgcctctaagaacaaacgcactgaagagacagctgtaactattagccaattagtttcatgttacaactactagcggaggcctgaaacggattcgtgatacctgactaatagatgcttaaaatgactttaattcccccagtattcttagcccatatgactgactgctgtaatgctttgcggctaataaaatttcagattgactaatttactgggtagctttaccaaaacatccaagtaatccgtacatactcattagagacaggtccagaacactttcccttaggactgatttgaaaaacctcactgggatcagcctcactgagctttagatgcactggcacaaatcaggtgaaggatcttctacggttttagtgcagcaatttatctgagttttgtggttaaagtttgagcatgaggtaattagagccctccaagcttgaaattcatgaaccttattccccctttaatagactctatacaagcttgccaagctcagtgtttgactgatatatatggaggctttgttaaaagcctctggtcaaaatgtagttttaaaaaactcaaaatcagtttttctttatttttagctcttacaggtgtaaacacggaagattgcctcatgttataactgagggccagtcagcagtctgttgtgccctttggaaatatacactagtcaataatcaaatacccgcagccgtgcagcaccacacctgctgcccagatggggtcgacgacaaacatgacatgaccgatgaggactggggaacagaggggtaaaatgctgcagtctgtttggtttcttctactctgtatcctccttggaaaaaaaatggaagataacctttaggctgctaccatttttgtagtaggagtgcttgggtatatatgtctctgcattaggcagtcataatttaaccaagcttcccaatgcctaccatgtatatatgtctttggaagttgaaaatataagttgaagatttaaaaatgtctagagacacatgcacacatgcatatacgtgtatgtacacgtaagtgtaagaaagcaaccatgccataccgcttctttttgtgtactctcacaaaagatcattacactccaaatccataatatagaatcactattcagctatagtcttgaggattttcatatatgccaagatactccatctctaataaatgttgctattattccagttttgaacaagggcatgacatgtgatttactctataaaatcggcagtttatgcatgttctcactcataagtgggagttgaactatgagaacacatggacccagggaagggagcaatacacaccggggcctgttggtgggtggggggctaagggagggatagcattaggagaaatacctaatgtggatgacagtttttgggtgcagcaaaccaccatggcatgtgtatacctatgtaacaaacctgcacgttctgcacatgtaccccagaacttaacgtgttaaaaaaaaaacatctgcggtttaaaaaaatttacaaatgactccaagaatacacatctttgaggaaggggaaaggagctaatgtttagcaaatacctcttatgggtcggatattgtcttaggcacttcatgtatgctatctcatttaattctcaaacagcatgctaaataaagcaggtatgttcacctttctggtaaccatatttctctgagacttttctaactggcccaaggtggcacaacctagaaaatgacggaaaagtcatatacaccactttggtgactttctttaatcttcgtcgtcaaaagcatcttgtcagcactcatttttgttttgctacagagagattaaaaattaagattgaatgaaaatgtattgttttctcactatttactaggtatgtgctagaaaactgtcgcacatttaacccttgccacaactctttggactgggtattattatctcactctacagatgaggaaactaagatctggatgtcagatgtctcatccaagttcaccaactagtaaatgccagggctgttatttagaaataaatgtttctgactcccaacaattgtgcttttcatactaaactacagctgtcttcccatctttttaagtgttcctgaatacttccagaataaacatttcaagattctttgatggatattgtagaggacagagctagacatatgctgatactaacaatggaagaaattatttctaaaaaaagtaaaaccagtatgagaggggaataaacttgcaacaatatataaagcttacttcatctcaattttgggtaaaaatttgaagaaaatagtgacttaacagcaatggtgcaagtgaataaaagtaagttagttcaagaaaatgaaagtgactatataggtcttatcagaatctgaaaacctcaaagcagactgtctcagagaggaataaaaatgagaggagagctaaggggagcaagttgaggtcagcatttagtattttcttctgagtactaaggacaaagtttatataaacatttttgaaattccagaaaaaaaaatctctttctcacttgccagatagaaagttcaacctcagtgatgatggaggcaatggcttctgtaaaaaaaaaaaaaaaatattgggaaacaaggtctttttgtctgccacatatagcagtcttggctttctctttattggcataatcaaaattcattaaataatgcattttagtttcctttgatgatttaatattcttttagctcacacctgtgtatattaataatcacttgcaatacttgcctgtgggtatttgacagatcttggctgcaaggaagaaatacttgttgcttttgtgatccaggagttgtagggactccaaaagcaattccaagtaactcctctatttatgacatttggagaacttttgccatggcaagagatacaaagacagaaaacttggagccaattggaccaggagaaaacatttttattgatgagcaaagtgatggatagtattggtagcatgaagtaagtaggaagcctcaaaacagcatcatcccaaagtggggtcttgcattttttgtagcatattggtatctttgtaaatctctatatatgaagtttcatgtcttcatgaacctggtaggaaagtcactctagtagtggagactggagtccttgcaaaggatttcctatttacgcagaggagaaaacgaaggtgagacagctctgatgtagcctgcaggactagcagaatggagactcattaacagtgggcaagaagggacagaggttttgggggaacaatgatggcttgggtttagatatattcaggcagctttccctatccgattctagttctggatgtggattatagatcattatgttgtttaaacaacatctggaagagctggaggctgagatccctattgtagtggctgggcaccacaccatggtacattaagtttgtagagtcaagttatagtgaaatattgaaaaaaaatagtgtgttgcttatttctcagctttatctaaactcctggtaattttgtagctttttaaaagagtttttcatctatgtctcatggcttttgcttgccgctgcttctcagggtatagacatccaaagtcactttaaaaaatatcccttaagcttgggtatgttcccgttactctcccttcataggagagtcatcccttactctcctttctttcccttccagattttcagaaatgttgatctctcatttgctgctcaaccgactgcagtgcccctgcccaagatcttcagggctctcccatgacatttgacagagtccatagtctctccttaaaatgtcctctcttctttctaggacatggctgccgctttatccaccctctgctctggctgtctgcactcaggcttttgctggttccccgcttctgcctctttataaatgcagattttccctgagctgggtcctcagcccacctcccattttgtcctcccatggcttctaatcccacctgtgtgctaatgacttgcagccaaatcctcatctctgccaaaaactcaattctgcgcctcaggccctttaggcatcaagatgggcttgtcctaaagacacctcccttcaacttcccatcttctccttaacacctccctgccttactcaatgtcctatcacaggaaaggaagaaaccattatactgtgttataactcagaactcatactgcgctctggcttttcccttatgaggtaatcacaaagctctctcagtcctatctcctaaatacctttagaattgaacccctctctacggtcttacttagttactagggtcaactcatcgtcatttattggctagactatgcaatagccacgttttcagctttcccccaaacacagttccaccctctgcaccgtgcctcaggtgatatagcacacacacgtgctcatgtccctctgtgctctaacttttcagatggatgccgaatgccgtgtgtgaactgagaactcctttgcagtgctgatggggccatttgtgactgggcccaacatgtcttcttcatgcatgaatgaaactcccatgccttgctcagcagtttgtgccattgtgtgtgttcttctctctacccaaatgctcccctcatccccaccaatccgtagcttgtttgcctggaaaactaacactcatatctagcccagatgctctcttttctcttacatctttgaatttcactagagttagatgctccttttcctgcagtcctccaagtaaaccgttgctcttttttttgagatggagtcttgctctgtcgcccaggctggagtgcagtggcgagatctcggctcactgcatcctccgcctcccaggttcaagcgattctcctgcctcagcctcccaagtagccgggactacaggcacgcaccatcatgcccggctaatttttgtatttttgtagagatagggtttcaccatgttggccaggatggtctcgaccccttgacctcatgatccgcctgcctcggcctcccaaagtgctgaggttccaggcgtgagccactgtgcccaggcaacctgttacttttttacagtttgtatttctctctccccagtctctaaattccttgagggtactggttccctgtcatttcctgaacctgagaagtttctctcatctcagggcctttatatcttctcttcccttcacctggacatcatgtccctccttccctttattcctgtctccactcaaatattataaccttggagaggctttccttgatcttccatggaatacagaaatctctgtccctacttttcccttccccttttaaaaatgttctttcatactgctgcttatgtggagatgtgcatgtgttgttgctattattgttgtcgtctggctccccactggaatgccagctccatgcaggcccatttgtctgtctcctttgttcactctttggtggtccatggcctggcacttagtaggccctcaatgaatctttagatgaataagtgaattatatccttttcaactaacagtgcctggcactgggtaagcactcagtaaagttttattaaaatagggaatacagagtatacattgaactgtggttaaataagttcccattgcctgaacttgccacactgaagagaccagtggcttcctggaagagagaagcaagacagctggaaaacaaataaaaatgactggctagtggcgaagtccgttctcatcagaattctggttcagttattcagttcaaatttttggcaagtgatgcagattctttttcagaaaatgttgattgattgcacagttgtacccacttcatttgcaaaccttcattatctctttttcctttcctccctctgtctgcatttagaaggggaggagcagtgtataattccacaaggcagttttgtgaataaaccaactaactggctgctgctttcagtcccacagtctcctcacagaatacaagtatctgacttagttgtgcattctctcttgactggatctccttgcattcattcatttgagtattcatttggttacttactcattcactcagtgaatcagttgttcagtcccactgatgacacagggcatctgtggggggtgcttggctcttgtctaaagcaagagttcttgacttggggtctatggctgtgtttcagaagctctctggaatttttgtaattgcatatgcaaaattttgtgtttgaatattgtcttatgaagagggtttgcttaaacagccctgttattcaaagaaagaaacatattaagaacctctaatagagaaaggcttgaactcagccttgagtctaaataataggtcttcaagttaagtgttttttcctcaattcattgtatggtggtgaaaagtataaaaatattgcttacatatgttctcgattctaggtcagacagtcttgtaagcctgtttactaatctgcattctccaaattgtgctcctctttcttgtttattttctaactttccctaaatcatagcctctgtaggtatccaaaagtcaggcagcaatggtgatgcagaccttgatcagctaacataagtaagacctagctcctgcatagttaccgttgaaaattgtgtgggcttttgtttatgtgaaattagagggaagatggtggggttgtaagagctgatttcagtttgcagtggtggtggctatgtacatttatctcatcaagttatgtctgaggcattcagcatcttaaaaccaatgccaattactgctggaatagggcatgagtgaatccttcaaaagaaaattcagtgggcagttgctgacactcagtgaattgctggctctttgcccaagtgtgtgtgaaatgtttgcactggtgtgaggccctgattgcagttggctcgcagggtttgtggtgacactatagatttgatagcacactgtaggaaaggcagaagctggtgacaacttacaggggaaaaaattcctaatattcctgttaaaattggaataaagatagttattgagaaaagtcatctttggaccggcctctgcttttcacaacaaagaggagagagctgacatgtgcttagcgcccccgcgggctgggccctgtgctctagagtgttcgctcattcacaagtatttattgtgtgccttctgcattctggtcccaattctaaatgctggggtttcggcaaagcacagaatgactcctctggcttgggaaggtgacttgctagtgggagagacaacactatgcagataagctccaggagaacaattaaatcagggcgggacatgtcacatgtcctcacaactgctgtgagaggcattaacccttttgacagaatgagaaattgaggtccatggaacctaatttgtctaagaccacccagctaattagagaaaaatggaggatttaaaacttggtctgcatgactccagaaccccaatcctttagtctgtgtagttgtctccccataatgtgacccctcccattgagctccttctcccagcagagaggacaagcacatcctggaaatggagcacatattctacagtaagtgactggaatcacagcagtgcacttcagaacacgcaggtgatacaacagtctggttagtgactcggttgcccagcacggtgccaagccagatgctgcgatgcaggtgtgcacgtcagggttttcatctaagcagtggtgttgaggtggagggggagagagaattgtaaagttggggttttcagacagtgccaaatggacattggtctaccagttgtaactatgtgactgttatgcagtattgagccccaagaaggcactgtaggtggggtcccagtccttcaggtttctaagaatatgacagtccatcgttgtcgcgggcaggatgatgcgcctggaacatgcatctgtagctacgttaacatgcttttgcccttgccttcatgtctgatcagtagatcccagggtcctggccatgatagtgcactgttcacgtaacttcactccatactccggttctggttctggcagtaccttattctaaggccttccctgactccacctctccccacctccatcctgagttgagagttgtacttttattgcatattgttcatttgcttatatgtcagtatcccagtagactctgatgatctggagggttaggagatgccttttcaattttatattccctgacacagtgtccagcacagataggggctcaacaaatatttcctgtggatacttttagctttcttctgccaacgtatctataagtggaaataggagcctggcttatatccctagcaccttggtcaacagggttgatacccttccatattataaggcttcactacattttggatgaataaatgtaattccatagcttgagattgttgagctttggaaatttatcagagtgacctttcaatagcaggtgctgttataagcagagtcttgtgtcccttgggccaataccccactgcttcacacaactctttatgttgactcttcttctggcaggaagcaagttactgagcataataccaagaagtgatgtggcccaaaagctaaggagagagagacagtgagagagagagaggatgactgaatatatgaatggaggaacaggagagagaagagggaaaaggcaagagactttgtattctttctcccacagaaacataagctgtttcctgcagaaccaacgttagttccctgtcgtatcagtggcctaggaaggcctagagggtgaatggagcattagactggaagtaataaggttgtgcctgacttacctcagtatttgtagcagatgttacaaatgtcataacacgaagctttgggatcagactgaaaactaaaaaatcaagataccagatgtggacgtcttccttttaccagcaactgcaactgacactgcactatttcagtggtaatctccacccccttcctactgggtggaatcatgccataactgtttgcttgctgctgaggtcagaggaggtgacaacagtaaagcggcactcattggaaaggcttttaagacagtttgcaaaatgaaagtgtaatcatcctttcccctcttgagagagtgtaccaaatctaacccttattaaaaatttaactgctcaaaaaaaattttagtgtatttgtagggaagataatttctaccaatgaaaagtcaagtattaaactttgcaaagttagtgctgtattcacatcccaaatttggtatgttctctttgtccctccctttgagagccgttatcagagagctcacggtgtctttctgtgtactgtgggcttaattcgtgagcgacacatgatatccctgcctgacatacatgcagtaggtgttttgtagaggaaagtgttcactgaaagaagaagaatttaaacaacaacagaagcagttcaaaactagaacctggagatagtactcagaaagcagagcaccttcttacgtcaagaatgtgttcaggcttggagcctggacagggatctgtgctacccactctgagtggcccactggcctccgctgacacacaggcctgcctcgcccagtggactggatcctcgtcagcttcgcatcccgagttcccagcagagtgcctgcctcagcctgagactcagtacatatttgccaccatagccctgatgccagaagaaattagtttctctcttcttgatctgttcatgttagattaaaaatcaagactttctagccctcaaagatcctcctattctatattctttattctgaagtcgctttataactgtctcactccccagacttccccaaattgggtggtgggggcgggagggggctggtgggttcaccccagcacactccatatctctgctgggaatttaaagataggaattaattttgggtatgatctaattttttaccttttatttattttgtaaagaaaaagaggaaattctcatttctttcactgtataaagggaattaaatagttaactttaagctttacatccaaaagcaatccctgtgacatcaagtggttgaacccaataaatacttaggaaagccttggatgttttttcagttgttaaggactaaagtcccaccccccaaaaaagtactctcttacaatcattgttcttctggaataattaagcaagtaaaattggaatgactgtgtactaactaccattttttaaaattagtaacagcacttttggagtctcaggtatgtcagggatgtcctcttcttttaggccagtccactcctcaggaccccttgcatctcttgaggatttccctcatgtaccctactctccacgcctcggcccaggctgtggatcacgcctgcattttcctgaggttctgtcctccgagacgttgactgtcagacgttgacctcattccctcaagtgctgtcactccaaacagcagcttaacccactgccttaagggtttcattgtcaaggggaagtgtgggttctctcacgaagaatgttaatcaccccatatgtagcccgtgtgagggacatacagtattcttatagtaactaccagattgttggagaaaggccatttcctcctttcccagctacagaaggagaaatatctgcctagggattctcatttccctcaatggaaaagaaaggtgggtaggcgaagtgaatctttaaaatggaaacttcgtactaagaggtccctgtaatttgttgctgaccaaatatacaaaaacattttcgagacttactacagtgatatttggttgccgtttcacatttagaggactatgccattttggtgtagaaaatgataaacattttcaaaaatcatatgaatactatttaattctcaagaagccgagaagtgcatagtgaacacccccttgactaaacagatcaattagacattgtatgttttccccttagttctttaatagttgaagcaatataaatacacttctttaagaaaagcagacatggtttctttttcccaaaagcagttcatttataagtattaaaatttgcacagtcgcctcatccctaattattttacccaatgcagtcaacccatacttaaatggtggaagatatttaaatatgtattgcatcaaaaaattttggatcatcgttaagacttcttaaaatttcaattgcattattggattaaatattcttttttgtctaaattggtgatataacatgttagtaggtctgagatatgaattatgaagatagtttttttgtttttaaaaatcccctaaataggaatttaaaaataaacccaaagtgtactactcctgaatacatgagattttttttctggtatttatttgttatcagatatgtgattaatcacgtgcccaattaacaatgcgtgtccctatttctcttctacagtcatcatttatcctatattttaatactagaaactaaccttgatgaaagtacactgaaaaagcactgtgattatttgttttcatatatatatttcatgtatgtgttttcatatatatgaaaacaataacagtgcgtcatgtatgtatatatacatattgcacgaaaacttcacatacagtgctttcaacaacagaatttcagttgtcatgttgctatatgggttaagctggtacccagtgctatttcagtttcttctccaaacctgaaaatctcccagtgtctaagccatgcacagatactgaggcgttttgtattgaaagaatacaatttgtgaaaacggaccccacagaaggcagagtgatgagggccagtttcagaataaagacacagcctatattacatgcaaactgagaaattttaattttgatagggaaacagatacacacactcatacatacctcatgaacttctggggctcctgagaaaaccctccctgacttctttggccctacagtgaggaaagctaattgagattcttcaagggaatccctttccttttcttctatgccatggaaagactcattaagcattccatattccattctttctcagccgctggctttgcttagccaaagcccaggaagtcaatgtccagggattccattaagcatgccctttagtgctcccttcccccaggctcagtgtgggaacagatccttgcccccttagatggaggattcagaggggagctatcaggggttaccgggcatgaagcctgcctttttgccaggcgttcctgagatactacctgccgaactttaagactacatttgcccgtgatgccgtactgccctccaccttatgggggaggataaggaagtacctctgaaatgatgtttcctatccaccagtgactgccttggcctaataaaacaatccattagaaaccctgcctcacagtgtcacagtcctcttcacttcagaataccttcttcaagtgatccctccaatagcaagcccctctgtggctctctgcctgtggtccaccttcccactgtgaaccatgctggcaaggagctggggttatgaagggaaagagcagggcacaaggcaagtagggctcgtgacttttcccctttcattatgtgtgtccaccgagctgtcctgcttctgttttgtaatgggttcttccatggcaagctgacctttcggctgaataggtcaaactcccactgagcgttaatcctcagccctcctcacgtgagtgcctcccctgaggtgaggagcactggttaggaatatgactgggagggcctggtgtattccccaaagaagggttgccttttactgcactgaattaattctcagagaccaccgtgtgaggttatgctgaaggatccagattagaactttcctgctgacattgtggaggggcaaaactaattcttcagatacatgttttagactgtggttcccctgtgtatcttcccctttttaatgagagaaaggccaaatgcacagtcttagtgattcatcggatcattttggatttctgagacaatcagaattttcctagatgattttttaaaaaaccaataaacccttctccctgtatttctcttccatttaaagtctcttaaaactctaggtgttttatttttaacccttgtaaaacatgaaatagtagagttgtggtgtgtgttgataattatatactggacctacttttgttttaaatgtcataaaacattttttggactatttattaagttttgcaacactaattcccttatagtagctagaaattttcaacatcaaataggcatttagtcatgttgaattgaattttaagttgaattcctgtggcttgggctttcttttttatactagtttgtataaactgttcaactcctatagctcttacgtctcactctcagtgagctggtaacagaatcttcacagacaagtggttgcacattccatttatttagcaatgccctctgtgtgtgtgtgtgtgtgtgtgtgtgttgtgtgtgtgtgtataggttaattttgttagtgttctttaaatttcagaaaatagtcttttagttgaacaaacaaataaatgaaatatgtcagtagatcagatgaaactgtgacccgttcggcaatagtaagtatacagtgtgtctgggctaccagatggttttagaaactgtcaatttccaaaatacagaaatctgagagagcttcataaacaatgtattgctttgctgaagatgacagatcccattgaggaaatgcccctttagttgttttagatcattaatgatactctataaacataataagattaacacggagaaacaaaatacctgtgtttgcagtattctttagttatcagattattgtctcagttctcaaaatgccaaatgtgataggataagtgcaagataagaagtacatttttaacatctattcagttagcattaatgctcaagttaaagctgggctcctaccagggacataatgggctcctgtttaacatatttatgttggttgtaaaattaggaactgtctttgcagcccacatcacctgcataagtgcaaaacatataaatcaagagaagttccagtgacataaaaatgccatcgaatagaatagcatgaaactacttgcaagatacttgtatattatgctagggtgtatgggggtacacactcagatttctagggggtttggagaacaaagaataactatacagatagaactcatggatgaagacatttcctcagagcacagcctgaaccctagtggagaaacagcgggaaaagaaaggccatcagtagccagacttgaataaccgccccaccccccacacccccactgaagacaacagcgtctatgctttcagaaggcatttgagcagctttatgttgttactggagcttgcatcttgggcctcctaagtcagtgaacttttctgtgatgttttagggttccttataacctggtggctattactcccttgccccctcataatccagttctttgtagaatgatttctgttatctaaaattagtccttttttctttttttgggggaggggggaggggacgtgcagtgatttattttgaactttgtaattggagtccctgaagtgcccccccaaattatgagctattaataaggagctttctgaatcctaattactgtctcaaaaacagagtggacacttgagaagtttttcaactcccccgcttctccctcccaaaagccacccacccccataatctcaaaaaaaaaaaaaaaaaaaaaggctgcagattttattcatgtgggatcattcacaccaagctaccataatgtgcaattaacactctagaaactgaaaacagtattcagcaagacagctgcattatcaaaaatgccaaaggagttttgaagggagtaatgtgcatgttagaataggaaattaatcagaaatgtgcacacccacatacacacagtagtactgtcttaagtatatctgaatattaaaattgtaaaaaccctatgtctatatttataataaagattaatctcagcatagtaaactgatttttctgttttaagatttttagttgtgtgttttgcttctgaagcaaatgaggaggctggagtagagatctctaagatcccttccagctggaatattcttttgataatgatcactcttcaattatattttataaattttcccattgaaaaaaatgcctctgttatttttctcttgtcagtaataatgatacttaacacacacgcattttcacagtgccttgcagacattgcagatacaaactcacatttgcaggggtaaactccctactttgcatagcgcaataatcacaagtgcatttatattataatccctactaagctgtggagcccactcaccaacttagtaactgaaatgcaacagaattaccccagcagcatttcactggaattttcttgtcaactagctgaaagtgtttctagaagtaagaaagtaggggattttgattttattttcaattagtagtagctgggcttgagagagcagaggtttgtaataaaattttcaaaaaaagcaggaagatatggggaatttacttgttagaaatatagaaagcatctgaatattttctttaataaatcagtgtaaagcaaatggattttttatgatgtcctcacttttgatttctgtacgtcacttccctcttttgtctataaatttgttctgaccacgacgcatccctggagtctctctgaatctgctgtgattctgggggcttcttgatctgtgaatagttcattgctcaattatactccattaaatttttttaaaaaaagaaaaaataggcagaagaacaggtttaacataaattggaaccccacgtaaaaaaaaaaaatcataaacagatgacactcaattctggattccacagttattattgcattaaacccacttttgttaaggattatgaggactccttgtgtggtaggcacctgcaggcaaagcaggtgaagcgtgcctggaagaggaccgactcttagtgagaaaacaggagtgttcgggaactccagataagaaacagtcactgacctggtgaggcacatgctggccaaggatctacctgggcttcttgtcagtcctataggaatagtttcacatgaatatgcagtaaatgtgaaatccagccatcttaggatgcttaacactagtgcaaatgatcatgaaaaagaatgtcttatccaatatgttgtgctgattaaattgtgatgaagttattgcattagaaaatacaaaaagtttcctgtttgcttttttcctagcctagaagatgtaagaagtttagttttctctggggcggggttgaggggagataaggcagtatgcagatgcttaaaaaaatcaataccttaattttaagaaaaatggtgtactaatttattttaaaggaacctgaacattcatatgtttttattccagtgtagggaaagccatccaaaaggaaaatttttaaagtctgaatgtatttttttgatgtttctagaagtcgatattttaggttgaaaattcaacctaggctatgtttatgcttagacaactcagaactaaaattaatactgggtggtggttcagatctcattgtaatactaaatagtcaatgatgccattcaagagaaactaagctgaagatatgaatcagagctccaacttaattgttctgttttctttctttctttttcttttaagttataggtgcacagcgaaggagaagccccagtgcactagccattgaagtatttgaagcacatttgggaagccacattttgcaggtacctttaaaacaaaaagaagctttcttatattttactaagaaaaaaccatatgtttagtcttttttttaaagaattttttttaaatgtcagctgtatatttgactgttgtgattttatcttgaaattccgaaattcttatgagtttatttttttctttttagaaagccatcctttgagagaatgttaatgagaaagggagggcaagtattatttgtgctgaaataatttagatgaattgcactatttagttcatgcgccatgtgtagtaactggctgttcccagaatggttgtgtgcgtgctgtatttgtaagtggatctgtgtgtgtctttggagctatatattgtttttggaagagcaaagttttgttgtgaaagtactgtgatttttttttttttgtgtcgccaaatttcagttctttgcttgagttcgtatttgtgagtgcttccaatcttaatgtttgcctccccaaattagaaaatttctcacgggaaaatatagtatatttaaaaatactagtaaaaggagacaaataataattgattttgccagtgaacttcatgaaaaataaatgttaaaggtcactaggatgaaactgtagttacctagcccgagagaaaattcattgcaaactcgtcatctcacttattcaaaacttttttttactaagactttgccatcgattcaacacttctgccttcaaccatagataattgtgccacactggtcctgctcccaggataaatgttgccatggccactttttttaatctgtggaagatacacctttttacatagaattggagaagcagacaagtttgggatatgtaggccgcttactgtatttggaaaaggtagctatgtttttctgagataaactttggagtaaaataaaagtatactccagatccctgttcattcagagtttataaacagggcctttatggtgctttccttttctaggttgtcaaaagtaatactacatttagcatattatcttttaagtatgtgcattaggaaacaattatgtgattctgcgttaaaaaaaaaaaaaagaagaaaaaatagctcatagtcaaatcctggtggttctccaaagcagtgtctttactggcagtttcagaatcacccaacacttgctcataggatgcattcttgggcctcaacctagacctactaaatcagagtttatagggtaaagtccaggaatttgtggtttttaacagtctcctgagataatttggatgttccatcaggtctgagatagcacctttcacatttgcaagtttaaagccctgagaagtcttactttacatttttgtttattcttatttcttgtttatccattaatatctgttaatatctcatagaactgatgtttcttgaaatacaccttgggagttgctattctattgtatacataaaattttgaattacctttgttacaacctaggattagtttcgaggacacagaaaggatcatatttctttctagatcttcaaattgttacttccttttctcttacacacatgttgtttggaatcttcattataggttttgtatggaccgtgacatataaattgttagactctgatgtgactgaggactatttctgtttctattctgaagcactcagaaattgttacctaagacttagtcaatgaaaaattattcagagactagtcctagattattatcttcttaattctttctggaaatcatgactccaaaggcctatgagtaaggtgtctcagtaattgcagtaatttaaaactaacacaaacttaggagtttgaatcaaacataaattcagtataaatatataatgtaaaatggctctcccaaatgctaaatcaacattatacttcattgagagaacacaggatctagaatggggctgcaagctcgttcccattttggatgggtcacattcagacaccacactatggttgcatcagctgtcacaccgacctagacagctggatgccatttggagtagaataaccagactggtgagtaaactagaaatcatattacgtgaagagtggcaaaaggcctgagaaagtttagtttggaaaacatgacttaaaaggggcatcaatgccctctctatttatttgaaggcctcatttccaaaaaaaaaaaaaaaaaaaaaaaggattaaacatattctgtgtcgcttcagaatatgagaaaaaagataaatggatgaaaatttagaatgtttacattatgtccatacaagaaaactcctaaatagggctggtcacacttggaataagtttgaagctgtagactttcaggagaaatatagatggcttggtaaagatgctttcaagaaaggcatctaagcatgattgcactatgtaatcttataattgccacagaaactagaacttttggtataatttgattttagcactaatggttatggagtggaagaactactacatagtattctaaattaactactagaattacaggcaagaaggaattgggaagtagtagtaacaagaagagcctcccttaagctatcttattagttgttttgcctaactagcagggaaacttttgagcccataagcctatgtctgtaccatgttcaacaatatcgcaatgttcagtaaggatgagatggcttctacgttttgtttcagaagggtccatgggagaatctggttggtccataaagactggaatgaattctgtcttccctttcctccttcctactctttcttcatttgcaaatagttgataaaaacctgtgtggtcagcaaagtagtataggcatgatctccaacctgacagtttatagtcatttaacactccccttcatcccccacaagtttcaaatactttataagaacacagaagccactgtatatgactgctatctttaaatagcttacagtcattcagggaaagaggaactaggaggttgcatgaagtgagaaatatcacacaggtcaagtactatggggccacaaaagaacaaggctctgaatttgccataaagcaccaaagaagacttttcaaagttgttgatggatgaatagaagtttattaggcaaagaaaagggaagaatattccaaccaaagggtacatcagacacaaaagcatgtaaacaagtagtggtaaatcttacttggggactgtttagatgtttgatatgatggctgcttcacatatgcagtgggacatataagagatgaaggaagagagattataggagccatattaccaggaggtgtggacttgattctccatgaagagtccatggagagggcttttatgcagcagtgacaagagaacagtttggtttatttctggagttatcatcaaaatacaacgtccaggaagtctgtgagttgtaagatactgatataaagagaccatttaggaaattgttaccagagttcaagaaaatgaagatcttttgcaagatagaggtgtgtgaatgaagaggcagctatggaattgagatagaatcattagcatgtggcccataattagaggtgaaaggctagagaatgacaggatttaatcatcaccacaagttttctagtttggctgctagctgtctgattctactacctgagagaagtcgagagggatggtctattaaatagccaagttgatatgaggtaggcacttggaaacctaagtcctgtttctgcagagcaattctcaggctaggtctggaattactgatcactggtgtatagatgaatgatagttcaaattaagaatgggttacagccctatggaaatgatgtggagcaaagagagggttaaggagagcccactgtggggtatgtcatcatttaagaggccagtaaacatgagaaaggaatggacagaaagaaaaagcaagccacaggatttgattttggtggaggaaggaatagtaataatgtcaaggtagctaaggataaatcctttagtagggcaaatcctgaagagatgtcataggttttgtggattgaaacagtcgctgtgcggagtaagtgtagaatacagacctaaagagtgataggaggtaaaggagaagaatctgagtgttcatggtaaagaaagggtgggaaatgagaagttatcatcaagagaaatttgtgtttttcatgtagtgagagtatgtttatatgtctgagatttatgggatcaagcattttgtgcatattggaaaagagatgaaaacctaactcttggccaattatatgctcttcagcaatctcctttaaaaatcagtatctcatggtcatgtctgtgctgagaaaggattggttttcattattattaatggctaaatgccattctatactatggatgtatcataatttatgtaaccattttcctgctattgagtattttgattacatctaaaaatgttcatatctaatgcatatatcaacgtgtctatgtgtgtgtgtaaacgcaaagagaagataaaatattgaaaagcatattttctaaaaagaaaagcctagtctggatggatttcagcttaaatatgatgaatttttactgtgtactaagtttcagatactgtgctaagttctcttcttatatcatcatcgagtacccacaatatagacctatgagataggtgctatgattacgtgcatcttaaaattgagtcaactaagattttaaaaacttaagtaactcaagttcacatgtctgtttaggtaacaaagttgaatttgaacccaggatggtaacactagggtcatagcactgcaaaaaaatgataagggcaattttaaaagacaatggtaataagaggaaagaattaaaacacttacagttggagtaaacaggcttcagtaactaattgaatttggaaactaaagtagaggtcagttccaaataccagtgtggagttcagaaaatgcctgtgacttcactgcatcaggtaccaaagcttccctgctacctgtgccccagtgacgtttcactgaagtgcatactacgtgtccctttgtgtggaggatttgagagtaaggggtaagatagactccttaatttttggtgtgcccgttctctgaatgtatatgtaatgtgtctctgctgtgcatatctaattagccgtatattctcgtagggaaaagaaagtttggtgggatcccttaaaatttgattacttttccactgagagggagaaaataataaacttaatggtgattttatcaatgtaaaatcatgtattacaaagccaattttcaatacccgtgtttgtaggcagggccaaggcccaggctgtgtattgcgaactctggggccgccattcacaaagcagtctcaccactgactgtgaccaatattatagtctcagtaaacctataactatttcaggcatgaatcgcaggacagcagcatcttctccaggagagttgagggttcaagggatgtcagtcttgcaatggcagggctgtgaatcccagccctagtgggcctgaatcaaggcattatagttcactaaattcttctctgatttttataaattagatgaagaatgggaagtcaaggggtaaaggttgggatttgtgcattttgtggcaggctcagtaaaaatccgagaacttgaggagatcattatgtgggatccttcctggaaagtagatgtgattaagcacaaatgtggttgctgctttcaacgttctcttagggcattatattgttcccacttcatgacttctttaatatgaaaaagtacgcatgttatttattgttacttttccaatataaggaccagataggatatttgtattttaccttattgaagttaacaaaacacaaaatggtagcaaatactgtcttcataagtcataaaattaactactggaatgactttcccttaggtgccagatttctgaatggaatgttttaatgctttaattatttgtttaccctcagcagaaaggtttaagtttctttcattttctaaataatgcttacataattgttatataaagttgcaatattgtttttgcaaactccatagtaataatgctgctttactcacctcacaggtgttaaacaagttaaacctagtacatggaaattgttaaggtttatgtttgtattcattgtcagcatattatattgaactatatgtgtgtgtgtgtgtgtgtgtgtgtgtgtgtgtgttactaactttgtaaaatacatgccattactaagaactatcatgtacttataattgaaagatagtctttattcatcactcattttggatcataaaagtaagttttgtgagttggataagtataataagtaccaacatgtttgtacataactaatagagaaattcatttattatttaaactaagtattgagagaataaaaagaatgttctgtaagaaatgctgtaaattaaagtaatggtggaaatattgtatccatgtgtcaatttttgcttggccatattaggtaaaccctcttgtatctatgtcattgaccccacattatttctggccacaaatgaatttttatattgcttttagaacattcaaacccaaacctgaaagagaattccatgagcatactctctgaggggactgagtaagagcctccaagaacattctaagattatgacccctgaggttctctgactgggagtggatcagaaaaggctaggtacgatggttgtatgattgcctggtcttcctcaacataagtgggggaatgattgtttttgcaaggatcatttattagtaaaataaccctcttgttcaggacacaaatgtgtcctgtgctaataaccttagcagaacagttttgttaaggtatgtattttctaaaaatgatagagaagaagggagcccaaatgtagtgattttctgtttgttagtcaaagtaatcaaagatttgtgtggctaagatggataatgttgtcaacctcagtgagctgtcagattttgttcatgtggtttttcatttcctcaacacctttaaccatggaatacagggtagaattatgcctcaaataaaagaagaacctgtgttttacagaggctgttaaggatcagatttagaagaaagtcaggtcaagatttgcttttaaatttctacgtttcttctgttaatcacactttgaagattggtaaagggcatatcctagaatcatgattagttggtccatatagtcttttggtcctgcagagttgtttttagacaaatgagaacatataggttctctatctaccagaagttttttttaaaaaaaaatcaggttgatgtaataaagaaaacaaaacaaatagtatcttatttatgtatttgttactgtttcagtattgctagctacagcatctctggtctctgagacccagccaattgtagaagaccgagtagaagattctgctggggaaaatatgctggatttataggcaaaaggagctctttataacaatgttggggtgtgtcggggcgggggggggagtagagaatgccaaatctgctgatagacaccttctttaatctcatatgccagaagaaaatgaaagattgactagtacaattccaacatctgggcaaagtaaagtgaaaatacctaaaacagctcaaaagctaacacaaagatacaaattatcatttattaagatgctgcctagccaagtcaacatgccttttacatttgatggtagtgttttcaaaagacctctgtgaaacagtgatatcttcaagtctattttctactttattgttgagttaaaatttcacctttattttattgaaatgtgtagatatacataaaatgatcatctctaggaagttgcatcttcttattcctgatggctctttttgctaaagtggtatcctgctggacatcagtgctaacgtaaaataaggtgatttcaaataataggagcattttgaattaattcctttagctgtgagagaggaaggggagaaagttgagtgaccctgtagtgtctctatgatccagaatggtaagaaaatgtaaaactaaatatagaaagagagaaagttagtgaatatatttgcatatgcaaattagcttaattgatactgcttgcctctacagggatttttcattacaaactggagtgctacattgttcagctcatattgagtaatttagtaactaatgagaccagtttgcactaatttgcatatgataaatgagcttaattgcagtaaataacttggaggcataattacttaattttcctgtgttgcacggcttttaagttcacgtatgaacaactcaagataattttgcatatttaaattagttgcttttaaattttcttgaacaaaaaagaggaacacaccttatcaattgagctataaaacaatcaaaagtagggattgcagtatttttatttaaaaagaaagaatgaaaaagaaaagtagaaattttaagtctgttgttcacctctcctatgtcctcacctcaaataagatatcagcattggcatttaggaaaatgtttttaaagttgaacattaactcacaatttctattagtagattgcctaggtttaaactaaaatatgtatatgaatgaatcgtaagtttgggaatagggtttataaaagagatgtgacatgtccattatgtaatttagcaaactaacatcagagtagtcaattgggtctactggcaatgtgcatttcacctaagttgctgggctttaatgacgtaagcatcactctgaccctggcatttattttctgttgagattaatgtttcatacttacggaattggtttcactggagaatcttattgtggtttgccaagaattatctcactggtcttcaaattatctcaagaatgcatgttttaccaaaatctccattctcaaaacagacacacaggatcaaacagaggttgattgtaaaccgttatttccctatattgtactgcctttggatgttaatcctaaggggaaaagtataatttcttattcaaaattaacttattaggccatataaaaatcatattcatgattttgaggaaatattatatagttgtaaaaaaaagtttaacatcttttatttaaacaattaatgctgctttaactcattatatataaaaactgatgggcacattagggctattactttgtcacaatctgaaaaaatagctcatcaaacttttctctgaaaagctcaaattctactaaattcagtatatgcttttttttcccagaggtgagccagaacaagtactaatgccagtatattcagagtgtaaaatttgagtccttcgttcaataggttgtcaggaaatacctggtaaataaaaaaatgaacaaagaaatcttacctggcaaggtcacagttaacctcagagccagggccttgtctcagctccgtgttagaagcttagtttgtatccacatctccagacatgggagagtatatgacagattcattatgtgcgtggatttgggcatccagccaacatgagtttatatccccagttgttcatttattaactgtgtgcacctacaatggtctcttgccctctctaagccttagttttttcatctttaaaatggagaaaatagtagtgaaagttttcctggctggcagattgtgaggactgaacaaaatagtttagttgaaagtgcttgatacagaacttgacatgtagaacacatttgagaaacatctgctagtatttctgttcatgtgttaggtagtccagaataatgtgcgagtttttaagaaaaatcctgatgcttatcagaaactttattacttcaggaatataagaacattatcaataaaattctctcaggttcaaaacaagataaatattctttattgaacatgacataaattgcttacattgatgtatccatttgacagttcaggtttagttcagagtaaaaaattttatatttggtgataacaatgtatttttaccttgagaatgaaaattcttctcttaaaaaccaaagaagttgtcataatactctcattggcaacttagaagaaactgaaaaagagagagtttataaagggactccagaatcaaagtctcctttggactaaagtgtgacatgccattactctccttatcttattacgtgacctcctcaacttgctcagaaaaaaaatgaggataaacacccaatcagaaatccagaagagctagaaggtagaaccagccatcgaccattgctataaattatgctggtgaaacggtttaatgcacatatgcttctccttgtgcacattgcacgaaatccatcatctgccaggccaaaaagttcacccttccatgtcagggtcagaagggagaacttctcagaaggatgttcataatgatgtctctatatggcagatacgtatccacggggatttttgtttaccttgctaactttgatttgcagaataaacatatgtcatcattcactgagaaagagtgagagaagtgtgagtgaggggaaggaagcagtttgaggtaacattttggaggaaagccatggtatttggccacttgactgaaactagtgcaatagtaaatggggactttctagttgcaaaatgaattacctcaagtggccaggttctagaaaagtgaaacagtaatctgaaagtactaagcttcagttcagtaaatatttactccatgcctaatttgcatcagggactgcagaaaatactgagatatggataatgagtgatgattttgcctctcagcattcccactatgagtagagaagagcaataagaaaacagaccaacatagttcaatgtaacataggctagtggcttttggatcacttattcctggatttgaatatctgcacttggttatatggacttggcaatttatttgaactgtctgagcctcagttttctcaaccccaaatggagatagtagcaagtcttacctcaaacagtgttagaattagatgagatactacacaaaggtgcctagtttagatgagacactgtacacagtattagctgagatacaacacagacagctcagtgagcactcaagaaaagttggctgtcacagaggctgaaccctagaagcaacaggagggaatcagatcacccagcctggagcaagtcacttcctgtgatcacacacacacagttcacctccttcactcatcacacccacacacatattccctttttaagtttggtgttccctgaggtcaggagttcaagaccagcctgaccaacatggcgaaaccctatctctgctaaaaatacaaaaattagctgggtatggtggcacgtgcttgtaatcccagccactcgggaggctgaggtaggagaatcgcttgaaccccggaggtagagactgcagtgagccaggagcgtgccagtgcactccagtccgggagacagagcaagactccacctcaaaaaaaataaataaaataaaaaataaatttggtgtttatgtggaagtcccctgagggtcttcacttctcaatgactcacgccttctcttagcatagtcagaaatgggggaggagaaaaacccagtgatttcattatgatcaggcagaatttgtttggggcatgctgacataaagattgtttgcaaggtatgggaacatatctgtgattctttctcaggcgctaagaatggccaaattatttggagattaatgtggaacagaaagacagttatactacatgttgagcacctctaatctgaaaatccaaaatccgaaatgcttcaaagatgaaactttttgagcactgacatgaccgcgagtggaaaattccacacgtgacctcatgtaatgggacacagtcaaaataaagtcaaaactttttgtgcacacaattattaaaaactgtgtaagattatcctcaggttgtaagtataaggtatatgtgaaatataaatgaattttatgtttagacttgggtctcatctccaaaatatataattatgtatatgcaaatactcctctcacttctggtcccaagctttttttttttcttcaagttgctattttaccaagttttttggtaaaacttcaaaacacttctggttccaagcttttttcctgagttgctattttaccaagctttatggataagggatattcaacctgtatcaattttcaaagttgacagacaatcataaggttacatgtcaaatagtaatagtaaaaactttcttattgtgtaggtttttatacctctctggtaatgtgtgtaaatatctgcaaatctttgccagattactgtgttcttcttggctttagagtagcccttggtggtagcagacatcacatttttgttaccggcatcagctaggaatgacgtggaatagggtgacaccagctgactatcatttatcttggacccaaaactcagtcagtatggccagtgttcctctcccatctcagtctctagaactttgcaagccttttagactcattttaggcttgaggaaagattgtgaatgggtgggtgggtgataatgtgcatcgtttctcaaactaagttgattgcagacaccaatgagatgagcatcctggactagtagtagtctgtggaacacacgtgaggaaagtggcttagaagaatcaaatcaaaattattttgagaaaagatctctaaatacaataagagccaaattgaacacataattcaacaattatattataatgtcacatctgtattctacttcactagctttttaaagacaaagattattacagaagaatcttaagtagttatccctcgtgtgtgtgtgtgtgtgtgtgtgtgtgtgtgtgtaaatacctctttaagctgcacaaagtgggggggaaaaagaaaatgttgaaaataaaaaaaatacagataagcaaagagaagaaaataaaaattaggtatctgactttttgtagatcaaccaaaataaaattctgactcttgtctcttgaaaacagttgtggaaggaacagctgattttaagaggtaacttccagtgtacttcatggctgatacatgtttatgaatggttttcttcttctgagcctggcctgggtaatactatattcattaaagaacacagaaaaccaagacctgtgggcaccaagcaacaagaaaggcactgtagggatcctgcttgggggaggaggggtgcagggtataggactcgctactatcttctgtcatttctgaactgtagccatgcacctgtgggcagacccaggagctgggtcagatgccctagtcacctagtctccagctgttttttaatagctgttttttaattccttgtgaatatcacttctcagacatttgccagtttgggatctgatgatttatgattgcaaggtaagtaatccacgggacagtgttattttgtgacagtgcagtagaaccgtgtctaagaaaagaaaatgtcatgccattttgctttatgtttattgtgtatttgggaaaaataaacatttgggagaattagtgaaattattataaaatttgttgttctggatgaataaaatgtgtaactaatgattggactgccctcacagaggagcctcgttgaattcccatgaggctgggtaactgctacaggaattgtcaggtcggagcagctctttccctcaattctaaagatataaaaaatgcaggtgaccctttaggccaccacaaaaatgccctctgaagtaatctactcttttacttcattttaggttgatacaatgttttagtaaatttcatctggtatagagattagaccaagggtagaattgacctaaagaaacagaaaattctttttttttttttgtaagtgggaagtctgcaagttctacataaatacaaaggcaaatgataatatcaatgactattttaattgcatctttaatccataaggatagttcaatgacattttaaattatacttttagaattgtagtcacataggagataaaactcagtaactatttaataatgcatagtaagatcaactgtatcctctcttgagatcacatttaggtggactgaatgtaaaagcccaatccagcatttagacagcatttaatcttccggaagatattgttacgtctttctaaatataaagtacccaggcctggtactttcagttggtacctattatctctgctcaatgattagtttcactggattcacagctaagctgtattattttttaactaggaattggattgctgtggatcaaactattttcaatattggaaggttactaatcagtttggggaatttatatgactgattggtaactaattgctatcatttaacctggctttacctggagactacatatagttaggttgtttttggtgggggaaaaagtagtaaagggatttgcttaaggtcccatggctattagtaactagctagcacagctgggattcgaaccctgaggtggaagtgagagagtgacagagaaaagaattataagggaaatattaggtattaaattattttacaatggaagtttttcaagtgacatactttaagctgtggtttcaatggaaacaagaggacatgcgcttttgtttaataaagaaatatttgccctgagcagaagacaacattttaaagcttgtcatttcattcctgggaaagtatttgaggaaaatgacatggctcagccctgtttgctgaccattttgttgtctcctgctgagacttgccatttccatagccggtgggctgtattgaatcagacagaagcaataggtcattaacagacatggagacttggggcagcctgcagagactgaaagaggggaaaatcatttggggccacatcaacaaaactgcatttaatagaatctcatgcagctatgtttgggaggggggcagttagcctgattttcagagaaacttaagaagctttagaaagcacaaagtcattttccccccaaagaatgtcatgcctaacatgaaaacagaggtcggggagggtactcacttctacatgctgcattttctcctgctgaaaaataactgcttacaattcattgcattgaaaaaaaaaatccaggttttattttcttactgacacctcccgttaaccttgagacctttaactcacaacattaatccaaaaagagattatattatttcaatcgatacctaaattattagattgggtttccatgatctttggagatccttctggattattgtaattgataggtagggctggggggacaagtttttttcactgagattgctacacattattttggcatttatgagattattcattttagaaagtatatataaccagcctcctctgaaatgcagaccagtttagctagggcgggaaaaatacagaccctgtttattggcagtaaacaagcatttatagcttgttatatataaggctcatcaaatgcagctttggggaatatgtagatattgttccttccctcaagaactgtattaatgaaatgttgtatccttacctgggataaaaggtgcaggtgtagagacaggacctaaaattccaataattgcatttacaattaagtaaaatttagcaaacagaatatcattttcacattatcctgtcacttatatttttaaaaattccagctaggcatggtggatcacacctgtaatctcagaactttgggagacaggtgggaagattgcttcagcccagtagtttcaaatcagcctgggcaacctggcaatacctcatctctacaaaaataaaatgagccaggtatgatagtgtgtgcctgtagtactagctactttggaggctgaggcaggaaaattgctggagctgaggaggttgaggctgtagtgagccgtgtttgtgccactgtactccagcctgtgtgacagagcaaaagaccctgtcttaaaaaaaaaaaaaaaaaaaaaaaaatcaccttttagatatacatgcatgcacccatgtgtgcttttttgtgaaaaaatttcaaaatggtttcatgtatgtcttagttttcctgttagattgtaagcaacttgaagatggctgtcatgtcttgttcatcttcgtgtcttccacagtttggtggtcttagtaggtgctcagtgcctttgtagaattgacttaaatttgtgcagataatgcatataacttccaactgattgatggttaattgtcccttttgttttgggcagcattattaaaaagtcagtgatagtaactgatttcagggtgcattcttatcacttgaagaagacatttacatgctgggctcctagtagggttaatgcattatgcacctaagtccccatgcaccaattcgagaatgtccttctcagccaaggggtcattaaagaaaacacagtcacattataatgtcatttgccccttaattttctgattacttacatttggtttggtcctaattatgaatacctttaattgctttatcacagtgatgattaactgtgcccaagtcaaacccctttgaaagagaggacaattccttttaaaggctttgcatgaatgcacctaggaggaatattaaacaaaagaatagagattttccagcttccggaagtctggtcagccttctaacatttctagtgaatgtcttccgaaaaaaatcccaggagtagttttcatctttgtgttttccagaactggaaaacctcagtcctctaaaatctcgagcatgttataatctgccgctatatttgcatgaattattctgccaggagacactattagaaataataatatacatgccagctgttctctagagtataaaaaatataaaaataaaaaactttgaaatccgcatgatattcctgaaggagtacatggctgtgtttggctttgttgttttccatttatgtgtttaaagtagcaatgattgaaatttgtcatgttttataaattaaaaagtttaaaacaccaattagaaatgatgtcttgctgaagttaaaaagaagcaatcagcttcattttaagcaatatttaatagctaataaaggagggtccgttttattttaaaatgaaggcaacaaccttaggatataaaagaaataaaaccctgagattttgtatttaaattctgtattttaattcagtttctataaaatggacggattttgagattttagtttattttaagattaaatcattttaaagtattcacacagtattattttaatgtttctgtgtgtgtgtgtgtttttaatgtttctgtgtttttttaaaaaaaaaaaacaaataccattgaaggccaggtgcagtggctcacacctgtaatcctagcagtttgggaagccgaggtgggtggatcacctgaagtcaggagttcaagatcagcctggccaacatggtgaaaccccatctctactaaaagtacaaaattagctgggcatggtggcacatgcctgtaatcccaactacttgggagcctgaggcaggagaatcacttgaacccggggaggtggaggttgcagtgggccgagatcgctctatcccactccagcctgggcaacaagagcagaactccgtctcaaaaaccaaacaaattttaaaatcccattttactatttttatttaaatcttttatctattttatgttctcagaaatatcagtttatgtatcacagtgacatctaccacccaggaatctagttgatgaagtttgtatcagtcaaacaaacttcattttctcccagttctttaccagggaagcccgggccacacgttggggattgagatggagaaggctgctcatctcttggtaagggtaggttggtcttgggaggtagaaggttttcgctttaggaaagctggcgcaggtgagcaggaggacacgtcattgtgaatttattaccaagctatccttttcccttgagcaaggctttagcatttttaatctatgatggttcacatttgccaagtgtctctttttcttgtttcattttgcggctcccagttggaaggaaaagttcatcccatggcttatttgaaaaggagcaagtgaagagaggtgatgtgtagatgaccacccttctttgcctttttggggggtaggtgcctttgttcacacagctgttctcgtgctgtggagaaactgccacagaatcagaaaaacagacacaaattatctgccacgatgcattttcttttcatgctaattttccctgttggaaacttagtgtatataaatgcaaggttgctcatagctgttttagaccctgcaccctatgtttctattcaatggagttaaaacaaacaaaactttaataattaagaattagagaaacagcaccagtagtttttgtttcccttggtagacttcagtatctaaaactgacaaaacaggtaagttcctggagtgctgcaatgtaaggtaattatgtatctcactcttttcaaacacactgaagtctaggcagtgccagtgagcacatcagggtggcaccagactgatccccagcagagaaacaatcaggtctagcagaacattcagctgtagggccaggaaagaaaagctgacatccagatgccagtgctttggaaatcttctctggagttgcacatatgggtcctgcatctgctcgggttatgtcactagtcagcgtccaaattgacacagctaccatggcatgaagagacagaggcacagctagatgtctgggtctttctgctaagacagctgtcaaaatcactgacgctggccttatgaaagctaattttcagaagcccaatccgggtactatgagtgaaaggttttgagtatacacattgacttatttgtgaaagttgattgtaggaaggaagttgtagtgatgaggaatgtatacgtacagataagtgtgtgtgcacttgaacacatctgtaattgagaattttttttttttttgaccaatgtagtagtgctcagggaaagttaggaccaaataattttagatggtgatttacatcagtgcagtatactcttgatatatttattctatcatggagatttggctaacaaatttaatagggacaataaactgttttctacccttttacatgaaaaaagggacagagacacaagtctatgaactatgagtatttgcctttcagtaagtacttttttatctcatcaaaatggccccaatgtcaaggagaatgattcagcacaaacaattcaccatttcatctctttcattccacagaatccttcttaaagagagtgagtagatttatctcttgttattatctccagcaagtatctgaaacagcaatgaccaatgggcagatgtatgtactggggtccaatttatgtatccactttcagtttcaatcttttttttttttaatgtagccttctatctttattgaaatcatcagttcctaatggataacaagttaggtagaggagaaaagaaagattcgtgatgtttgttcttttttatttttctcagtattgggaacccatttatcaacagttttggaggctcagaagtttccaaaagttgctgtatttcttgaattttatcattataatagatttctattaaattataaaaacatttacaaagctttaaacattgttacggaagttcacagattttgcaaggtaatgcctaacagtgattgacgttaatgagaatcaggtgggcgtcttcatgctgttcataactatgtattccaatttctcttttgcaactagatgatctagcatcgaaagtataggctcttagcattaatgacatttctaggtcattcttaaatggtttctgtcagtttgggatgtggccaaggctgtggtattcctcttgatctaagggaggaagtcagagttgatttagtcagccccttgatcctaatgttgaggcatttacattgaaatgaaggaacccacatgggaccaggactttaagtcacctacctctcaagttaggacaggggccttcataattttgactttgataccacccaaatttttacacatttatattccttttgcaccctgagtttagtctgttcaatgtcagatgagtaataatcattttaagctacctcagtgttgtcagcccctcaggggaatggctggccacacttccacagaggcagcttgggtattcgaggttggatgttggggtggcactgggccctagtgaagaaaaattcctctcctccaactccatcccccaatgctggcaagactcagaagcccggagcttagccagggagaacctttatgctgctgttcagccacagtattcagttacccatttttttggcctaaatacccgttacttctgttactttgatggaagattttcccaggatattacatgcactttgggaggccatcaaagcaggttcctgtccttattcacctcacacatccagatgtagaaatttaacaggtagggggctgcctgcacttatccttaagtcccacagagagggcaggagaaggacagagctgtggaaaacgggcaatgccagggtaaggccttccagtccccggaataaaagattggagtggtggtaggtctcatatcacaagggcctctcagtgaaataatggtttgtttattatgccctaaattgaatactaattcatcaaatattgatttatgtaattatttactgagtcctggaccctacaattagatgctgcaaataccaacaaatagtcacagtctttgttcttgtagatttcttcagtcaggctaaggaagcagatatagaaataaataaatgtgataatatctactagaagctaaactagtcatggtagagtcaaagagtgaaggaagcctctaaggagaaggcttgaattctaccttgtagaatgagaggaggtgccataggggtgtgaccttgagtaggaccttcactggtgaatgtggttttaccaagtaaagatggatagacacaccccaggagaagtgaatggcatgatcaatgcacagggctttgcaagggtataggaagtggccctgtgtgaatgcagtgaaggagctgtagaaaagttggcattggcatgatattcattctaattcaaaaagtatttttgagtgcttattctgtgccagcatggagctattaacaagtaaaacatcccctgccttcaagaaacacaaagaagtagagggggtgcagatattcccagagtgatttcagcatgatgggcaggaggtgagtatagagagaatgtcagtcttgttgaggtcaaatgccagtgcttaggatttgggctttacccccagggaaataggcactcgtgaaaaaaaaattaatttggaaatatgattgggatttctgtggcaggtgaatgggggcggggggcagaaatagactctgaaggcaagaggaagaaccaggtagtggttgtgatagttgtggggaaaggttatattaagttatattaagttataacttgaggctcgagctgggcgttctagtgagattgcaatggagaaggagctgagacatgtttcagaaaacaaaagcaaaatgtattatattcttctttccagattgggaaactaaaacttagaaaagctaaggaacttattcaaatttacagagataggaaatgatagaacctgaatatgaacctagcaatctgttcccgatactgcttcatggcagtggttaagagactttccattgtgcctatttcataggagtgacacgtgaattaagtaatataatccacgtaaagccctgtggattgtgcctagcaaatagtaagggcttcatacttgataacttcactgctattttcatcattatcgctattaacatgttgttcccttctcacctttgtggcgtgcactacctctaggtatgctatagactctcaagctttacagaggcaataaaaggcactgttcctacagaaggcactgtgagtattccaaaaagattggtatcttggcattctgtgagatatatcacacactcttggcaagactttctaaggaggtaaataacaatagtacttcaaaacaagtaaacgatcattattaaatcatttgaactatacaagtgttagccatttggaacaattatgtcaggaagttttcatcatcgcgactgctttgttttggaaattatatatgtttcctttaaggtatttttaataatgacaaagtcatttcttttaagatctgtttgaaaccagctttaccatggggaaaacataaattgctgtgagaacacaatcaggataattcactagtcttcctaatcaccctcaaaatatttatgttattagaaacagaactctattaaatattatgttcaacctcctaagtggtagaactagacacttaggttttatcctttccttcagtatagtcatttacaaagtgacactaatgcagctctcatatattaaagggcttgagtgagtttagcgggggctgttgcttgaggttgaagccacaatcttaattttattgaataaatttttagtacaccattaacatgaaacagaggataaattcatctttattatttttcatcttgagaaaattatcttaaaatttgttttttaattttatagctaaaatgtgattagctttcttttataaaacaacacattttcagatttttacaaatcaaacacaaattatttttgaatgaggaatgttgttcctctctttatgtgtgttcatattaagtgctggtaaaattccattatgttttgacttgaacattaaatattaccttgaatatacactccccagcagtcgcattctgatagtgacatactgtactgtctgaagggtgtcatatggtcatctgtcagccgaatgttgttccatggaaagaattttattcttcagatgtcatctagaatgatttgtgttaaaaaaaagagaaatacagaagtattcacagaatctgtatgtgaggaaattagagatgggaaggattgtgctaaggatactggaaagagattcattctttaagaatacaattgctttgtaagaaaggtgaaaatggttatatttgtgagtatttttcatttgatatgattgtattttatagcagaaaagagaatactttttttcagaacttttggaacctaggtctccttgtcttttgtcataaagacagtggtgaaaacaagtttcttggtagtaataggagagaaagagtgctgcctccctgccaaaaacagcagtctgagagaaaggtagaagatgatggcttactatatcagggcctacagtgatagagaaaagaagaacgtgttcttgcttcagaataatttagcagtcaatatttctatcagcaatatttctttcagcaggaattaagatgctggcccttatccaaagacacctcatccccctattacattatagatctgatccagctgtggctgcttctgtagagagagatgagggcaggtctaatagccaatttgtagagtgtactgcaccaagtatatggacgatggatgtttcccatctaaatgcattttccttcctttaatctttgcctggactatacctaggattttgtggatgctcttaagttcccatctttaaaatgtggggaaaagtatgcatctgtgcttgtgtgttacattgcacttttagggtctagaatctatagttatattaagaaaagagatacttgtgtattttttattttattaccatgtttcattcctgaacagtctcaaaattaaaataggtgtatcctgcccatgtttgataatttagaaacttcagttctgtcttttgaaaaaaaaattaataaggcatgctgtgtcctgtactttcttttacaaatgtgtaccttggaacattgcagattttgtcctttaggtatcctaactatttgtattatgtatccctttgaactactgatgtccatcaaggtaacaataaggggaatgccaaggcacagaagtctgaaatagtgtaaaacaaaaacaaataatcaaatattaagagacaataatagacatttaaacaaaaatcctcattctttggcccatatctttttttttttttttttttttttgagaaagagtttcactcttgttgcccaggctggagtgcaatggcgcgatctcggcttaccacaacctctgcctcgcaggtttaagcaattctcctgcctcagcctcccaaatagctgggattacaggcatgcgccaccacacccagctaattttgtatttttagtagagatggggtttctctatgttggttaggctggtcttgaactccctacctcaggtgatccgccagtcttggcctcccaaagtgctgggattacaggcgtgagccactgcgcccagcttggcccatatcttaattcactaccaacgttactgattttatatttcattcaggctcagcctatctcaaaaacctctttaatttttgattaagaggaagagagaaagagaggtagagagggagaaagaaatggagtggtgaaagagagagtgtgtgtgaacaatgtttttttcagggatgagaagatattgtgttgaagtttttatgatcagaaatagaaaacgcacaaagtgaggccaatggtaataaccttgtagttaatcctactggacaccatgttattcttcttggcgtttccagaacttcagagacatgctcacccttgggtatattgatgacagacagtaaaaggtcttagatcaaactcccagatatacttaatttctaacatacgatgatttaaaaatgactaatcgaattgcaaatgagtaagagaatggtattgatgaagataatccccttactgaataaatatatttcctaataaatcagcaacagaaacatttctggagctggattttcagatgatagttgacatttttagtttaaagaaaatgggttaaaatgactaaaatttctatgaagtcatatattgtaaaagttagtttgactaataaaacagaaggattatctcagtagttaaaggacatgtgggcatcatccctcttgtcacatattctactttttatagacataaaatgtagtttatttttgccgcccttaaaattacccctggattgtaacatgtattcattaaacaaatataagccagaaggaaaggaaagaattaatatttattgagcatttatcacatgctttacaactgatttctttacattcacaacctcccaatgaaatagctattagtattcctactttatagataatagaaaaaagtcttaaggtcacctagctagtaaatgatgaatataggatctgtacctaggtctgtcggatgccagtgactatgcttttctaaaattgacatataaattttaatgtaatcaaaataatgcagtagtagcttaagaagaaaagtactgacgctcggagttcaagtaggaatttatcaacataagacttgaattaatattatgcttttttgaaattagtgcatcattcttttgtgttcagttatgactatttccatatttccaaaagaagtctggaaatcccctgaaagctaacagatgaaatggtgttatggtgtggtgtttgagtagtgtctatcagaacaaatacagattttacacatcaccgctcgtgttacccttactccagttgaattttgccctctacacagtatttttccttcctgtcctctccctcttttcctccagtgttttttcttcctctgctatcccatgtcttcccattcataaaatgtgaacttggttaacagcagaggtgatcctctcatggccatggctatggactgtgatctgctgagcaactacaggaaataatgtttgctggggtgagctcttcccatagacataaaatttacccccatgaccctcttttgtgatactgctgagaaatttttctctctctagaacatatttttcaaatacttgttcaaactaaatatgcttattttctaaattgttttctactaaatgatgtgacaacattttgtacctgttgagggaagtgaggggtgggacactaatggctaattagcaggataataaagtgtgcttgtatcaagagatttacttaatttggggagcattgttaagccattgaaatgatatttgttaagctgtggtcaccgtatttgctgatagttttttataaggtgggtggaattccttacgaacacagttaaaggaataaggatgtactacaaaaacaggtgccactgattcgcatttttatggatggtgtacattagacaaggagagtcattactcacaactatgcactacttcatgcatgtttccttggagcgcttgctccatttcttaggtccggagcctcctgcttccaggtttttccacttcagctggccgccaccagttacatgtattttaggcatatactcttccttcactgttcccaaaaaaggtcgggggagaggaaactttaattactcatgtaacaaactgaaatagagttaatttccagggttgcagctgaattattagagattactgtgttataaatggcaaaagaagggccccttgcttgtgtggtaatgctgtcagggaccccgcggctgttggctcagttcatgatatatgatactgctagcatttcagtgctctcaggggatctctggtcctaccataaggtcaagagttaactacttgtattttagctgtgtactgctatcaatattgctcctatggaaacctcacttgacgtcatttttgaatctttgcgactatagtcaagctttagtaaaagtcaataaggacattagactgttgtctatattattacttgccacttcctgccagcaatctaccaattcattagcagagagttttggaactctcgcttgattatttatgcagtcaatagcaaggcttgtctgcattcataattgtttgattttatggcctcttctttaaacaaacattgtctatggtaatgtgatgccctgatggatgggaaaggttttgtctgtgaatatcatttagataattaaaaatgacagatgaaatcgcctgctgtcttgacctgtactttgttccctcagtgatgctgaagagatgctgattgctgtcaatcaaaacccattggaggtttgtaaattctggctgctgtgaactctgacccccactgttgatctgaaatagataataaccttgaaattctattagaatttaaaaacagttttactaaaggggcacggtatatatttcttttcctcctagaacacagttacttaatatcactctttacaatatccagaattaaggtaaaatatagtgcttagcaaagcttaacgtatcaaatgagcaaagatcttattctataatccccaaaacctgatgagaatttatagcccctggcttgtcctattcagcaaaacttcagcttttgctgcttcactgattgttaatagctagaacttttttagctaatttttactaattttgttgttcaatgaattattttcatgttagcaggatctacatgtatcatttttccatatttatcctaaacattttaaaaatgctgttttcccagaccaaaagaaatataacaattagatttttgaagtcagttgaaatccaaaggccaatttctatgcccaaagttctcagcaaacattatcaaaatcttaggtcaagagatcgatcaggttgataagtgcatttgccttgcatattgttttttatctttacccagatgcttaacatatattccaaagccccactggtatttaaaatatgcactcaggtaaatggtgatgggagtggaggaggaaaacaaacatttatcaatattagaatcatcaaacttgccaacagccaaaaaccattagtaaattctacaagctagaaaattataacaattaggctttaacagtttttagtacactggttgtagcaaaagtatgtaataggagcactgcagtaagagaattgcaaatagcgaggatctcttgaaagataattgaagtagtgttggtttttctactagagaaacttcttcagagagtttaatgaatttgtgaagggtcatatgaagagttattatcattgttttgcatttcgtaatcagcagatactttaaaataatattagttctgtcagtgcctcagtgacaatggaaaataaatattatcatttatttttggcagttgatgaaaatatcagaagcatagctgttaattttgagggtgtttatccagaatgaaccattaactatataaagattattactacatcatagttcaagttttttttttaccttggtaaataaattctttgtaaatatcaccacttgggatacatttgttacagcctgataaaaagttaatatactaaatataaacatgaattatctatctgaagtatgcatacatatgtgcacgtatacatacatacatatatgcgtgtatacatacatacatgtatatattatgtatatgtacagatagataattcatgtttatatttagtatattaaatacaaattttaagcctgttcataaaagcttaacccagttccactatttcaatagctccctccttgttctgtcaggtcccctggggtggcctaaacctcagacattttggcatttattatatattgccttattagtgctttcattcattcattcactcagtcatttatttttgaattcattaaacaagcattaattaaagaccatttaggtatcaggcactttccatagcactaattattctgcatttcatcttatctccccagataaattataagcaaatggacttgaaggcccagcggttccttcctagaccaggtgcctcctagttctggatgagtatctttgtctctcttaagtggctttgcccccattccctccagccccacccaaagtagtcaggacatccaattaacctttgacttgggcttgtttcaaggtgttgtggggaggaagcctgagaaagggatagtgaagactttgtgaacctcattgagataaatagctgacagataacttttaacccagattagcagactctggcaatatctataatgaaggctgagtctcagctcatttgagttgtaaacatcacagccattgctgaatcaagtacaagatgattcaactctcagattttgatgcaaaattcttctctcttccctgtgcctttaacatagtcccatttgatttaatggtcctgactctgagcagtgctgaggattaaacgtgggtgatttcagttcaaggaaaatacctttgttatcttattttgaccttaaatactacagcgttctctattggctcctcaatccattaagttttacatggtagaactattgtttgtttcagaatttatttattccacctctgttaatatttcaagtctatttcaccaggaaaaaatatcatctagctgctgaaaaatcctcactattcctggccattctattcctgcatggttctctatgatatcacattcacaaattatgcataatctcctaaatactaagtttctttataggggaattttgtgcacattttagccaatttcctttggaatttttatgttgcttaggatacagttgaaaggatttcaattgaacttaataccttatattcatttatatatacacttatgtgtatatgtgttatgtgaatatataagtgaatataagtgcaatgtgtacatatattatatctgtccatgaaaactagctctagtctgatggagcatgcacaaatgctttatttatggaaattttataacatataaacatattctatgatcacttattccattgtgaccttctttatatgctttagaccttccctgtgtcatatgatatagacacaaatataaaatggtggtggcattattataacagattttcacagtttaaggggcctgtctatcaaatccatggggaatggtgagtttggtgctgaattaagaaggctctttcttagctttgtaaatcaattgtaataatgacacctaagaggccagtttgggccaaattcataccagtcacagatccaaaatctccccttgacttggttctctgtctcttaactcctggaagagaggcttataattgcagctctgcagaaagattgagtttccactaataacttgttaagcacttactaagtactaagccacaatactaggcactttgaaacagacactatctcatttgttctgtgttgataattattatttctgttatttatatgaagaaactgaagttcagagaatttacgccatttgccccaagtcccacagttaccaagccacaaagctggagttctagtttaattttctgaatctaaatccagggttctttatgctactgtacagtacttcttggtggctctattacaccaatgctttattctaattagtcaattgcatgaggttaatgataagaatttcttattgttgctaatagtttccattgcactatgtgcactatatgcaccaagttttatactgtgtggacttatttcagttggttctcccaagacatgtaggagacaggtattatctacattttggggatgagaaaaccgatgtatggaaagtaacacatctaaactacagtgtcctagcccgaattcaaatccagctgtgcctccagccacagctcatgcttttgaccactgcgctctgagtagcagcacatacacagcagagaaggcacttgatcggatgcttttgatgccagctctaagagcatccagttctacacagatcagaaatagacacataggtcctctggttatttaactgaattcagtccatttggggcgtaatttttgtttggcttcattttactaagttcagccaaactgatttatatgaagcctccaattatcttttcagtacaccaatgccaaaaattttgttagggaaacattcttctcctttctccctctcagggagagatgattaagaaaaatcaagttctagtggcagctgggtcttagagagaaggtttttcctacctgattatccagttgttttggggatggcagttcacactgcttggagcagagtctaatttcccgaagattaataatattaaagaaagttaaatgaagcaaacagcatgccacactgtgcagagccccagtcagaaccacactgcccaattcccttctgctattgggaagataattactgaatctttgttcctgtgaagtaaatgaattttgaatcctctgtatgtttaattatccaaaattgaacctttgttattttcctttaaaaaaaaaaaaaaaagtacaggtaaaacccagtgatatattctgagcactaattacttccccaaatctcatcactgttttaactttttcttagtaatatgtcctaagagttatctggatttattaacatgcttttgtatgatggatagataacaaggatgtttattttgccaatctacttcttggttaaggttgactttgtctctaaatgtactctggccctaaataagtacagatttttaaagatatgtgacataagtctaaaagagtaaatctataaaatattgaaattatgtttttccatgaaaagtgctcatctattctttggaaatgaaattttactgcttcagttatccccacatagtaagaaaatgctgattgttgattttgaagagattaagttggttttgaattaccaaaatttatttaaaacacataaactctctatttgagtacaaagtcatttttttttattctaaggggctcctgaggttatattttgctacaatatgaaaattaattgtgacaataaaggccatgattacaagcctttcacactttcccactgtgacaattagctcccaatggttagaccatttatttatgagaacattaagagttcgagccgtcttgacatgtaactgaaaatggactattattgaggttggttatgaacccaaaggacacaccataatgtgctttattggttgaagaaaatcgtacattttagggtaatatagctgggttgcttctaatgatttcagaagcattgctgtaaaaggtatcttaacaggtgactcttctctaaactctgtcacatacacttgcttttcattagtgagaatgaacttttaaaataagtgtattgttcatggagagagtctgacattacaggcagcatgatcaaagtgatcatttttttttcttaaggaacatggagtgcttgcctcttccggtagaacaaggtaaggcagatgtccctgaaagtatgcaggctgtttcctaaagagcaacaaggagaatgaggaaaaagcctccattaaactttcaaagagacatatgtttcaaacagacttgttcagcacttactccctctgtaaaagtgtgggaactctatagatgcctctttcctgtggatagaagaccactgcatgccacaaggaagtaaacattacagagatcaacaattcatttactaagtcctttctacaatattgtcctgaacccttgattagttgtagatgaagctgggttttttttttttctttatgccacagaaataagccatttcctttcctttctacgtggttatttttacgtattgtgatttttaatctcactactcttaggtcaaggagctttctttatatttaatgtaactctaatattcaaagacaatatgagtagtgtttaagagtgtggattctggactctgatttcatttaaaattcaataccagactcaactgttaattagctgtgtgatcttgagcaagttgctttaactctgtacttcggtttcctcaactgaaaaacagaaacaaaactcatatttaccagacacataatcaatgcactgtacacattatctcactagctgctattataataatttttttacccaaaacaatagctttggctacttaagaagtttttgaggcttatcagccaaaaatgtatttacagcttctgataattaaatgttacttattattttccttcatcttttaacattgtataagaattttccttacatttttaaagatgcttttcaagttcattttatactaagtgcctttttaaattcatcatacacacttgtgattaaagggattagagaaatacccacatctatgcacttataaaccccagaaataatatttgaattccaagcaaagaaaatatcttaagggacataatagcaagtgttcacctgcaagtgtggaaattttgctcacaccttgtcctcatggaaaatttaagtcaagttctgacttgttagggccatagagagaaagagtaaaaaaattttctggcactttatgggtttctttaaaatctcaattctcacagcattaactaaaggcgaagactggtggttggtcagaaaattagaggtatagtcttgctgtgaaattgttctgccagataaattaatggacctaattaacaaaatataaacagttctaggaataatatagaccagaatttagataaacaacataaccagggacatttagttcaatgagaagacagtcagtccaactctgaaggcttcttgcctttcctggacaattcattttcagtggcatttggaaacattttaaactaaataagatgagtggtagtgggagtagtaggggggcgtggtggcagtggtggtggtggtggtattggtattgatggtgtgtgtatgtgtgtttgcccatagaaaaaattatcccaccaagtatttcagacctacctaggatttcagtttcattaaagttgacttgggttagaaaccaacttacatactttttgtctttttttttttacagttcttttctcttcacttgaaaagtgattcccaagtggaaaggagtagccgtgttagatttcatacatattagatattgcagaatgcaaagttataacagttcttttgtagtttgttagcaagttagcatactgaggacgttttcaagatgttagaaaattgccttttagaaatcattttccccttcagagccttacaaaaaacaggcctgtgctgtaccttgcaatatttatttaattacagaaagctgataagtctgaaaattgtatttccatcttcaggcattggtggccaaaggccacagaagagagtgtagaatggggaatctgctttcttctctgaggtgtgctgttaccctggccagatcacgtttcaatcacagatctcagtaactccaaatagcatttccaggaagctttccatatagccatcttatttccaggacattggattttgtattggcgtagggaagtgttaaatacgagaacttgtaatttggtgggtccttttcttttgagagtctcttaggaaaacaattagtaatgtcatgctcctcccattgtggactctggagtcagattccactggggcctcagctcagctgcatgcctttgattgtctttccttcctcactgtgaactgagtataataattggacctcatgtgaaagggaggtgatttttaaaggttaattgaaataatatataaaaacactgttaagtacttaatattgattactataaaatatatctattcattttattaccattacatctttttgggtcataacaataccctaaaaacactcttagcgtacactagctggaaacaccacccagtacactgaagaatgaacaactgcctaacacccatccaaaggcctccattgctggaggctccagcagatctttggtggaaacattcttcctagcagtgcagcagggcactccaaggatagcgttaacaagggaacaggctacatttcaagttaaaaatcacagtttttctaagttagaggaaaagaaattgtaacttatcttcctgtggcctggaagagacgactgatgaccaaggcatgtccctacaaatagatattcatgttgaaaatccatggccattttcatatccactatctgccatgcagtctgttgcccagtagacattcttggtacaaagtccttctatgggtctgatttacatatctcatgacaactgagtttatttctgctttcctgacacctgaggtacctttcaaaagcaacatttgctcagtttgtggtgtccttttgtgccccaagctcttcagaggcatttttcaattaatctgaaaaatcccatttgaattatcaaggataaattgatacttttcctcaatctcttcagtgtcaaagtgagacttgaaataatgtgaccactgagaaatgggttggaaaagcggtactttttggatctggacaaactctagccctcctttcaggaggtgcttctctaactcggatgaattgaatggtgtgagggacatcatctgacccttaccttctgttattctggctctggacttggctggcaggcctgaagagtcaccagcaggctctcctgtgagctgagaacatctcctcatcctctgtggtgcctccaccagactttcagatcagaaagtgaaaaagcttaagcatcaactaaatggtctctgctgtggggtcctccaactccaccaccctcaggagggacagccagtttttcacaactctgtcatcaccctatagttcttatttttattcaggtatgctttccctcaatgggaatttatcacatgccttctgtgtgcctaagtgctggctgtagaggccttgggcactggcccagagccccttgagtctatcactacagagaggcactgtttttctgacaaggactactaagcatttgttcatgtatgtcagctcagtgaatgatcaagttccagcagataatatgtgggagagagtccctagctatcagtatgtggaataatgctggggagtggtatcttccatgcctctgtaggtgaacatgtttacagtgtatgctgacttggcattggtaggggcttaaaaatttctaaatcaaagaggaactcttaatgagatctatgaacaatagaaagtcaccagataaaaccttcaataccagttttcatttttatcagtattgcatttccctacatttgtaaccctatttttattaagagatgtttccaaagccacaaagttttgaaatattacagagaaagaaaatgaactagaagaaagtttgtttgctcacaagaaagttatagaaagcttgttgtggtaggtaaataggcattaaaaaaaagcataagaaatgtggatctcattctctgatgcttagcaggaggcttgtggtatatttttttataatctaggcctaagaaaaaatgcaatagtacaatacatcactgatacaacagtctgatagattataaaatgtttagtgagtgtatttcacttagacgagcaggaacacctgcttctattattccttcactgataaaatggtaaatagtttatgtcagacatgcagctttacctaaagccacatagtttacatgtggggttggtcatttgaatggaggtacatggggtttgtattcaatttcttctttaaatgattcagtaaaataatagggttataaatggacagtgacatcattttaatctttattcattttatcttctcacccactctttccttcttttgattgcacctcccccagtattaactgcaggacataccttcatgaatgaactattattgtggcccacggtaatggtggtggacatccatgtggtcagtctgatgccctttctctctctctctctctctcttttatttccttccttccttccttttacaaaagcagtttgatttctctcatcatcaataagaactataaattaaaatctgacagtcctacatcctcctgctgaccaatttaattaagcagtaagcacaaatatatgagaaaaagcacaaccatattcaaatgttaggaagataatgctgtaaagcagcagtaatcgtgatgcacagcgtcctttcaggtacctgggaagtgggggaatggagaccaagggaaatagtaaaatttttttgtctctaactgagaacactgtcattctagctggaaggactggaaattgctgcctccaagtcaaagtagcatatggtatttcataatctctttggactgaaggactgaaaccaagtccttcattgaggtgtgaacttcttgttgctatactacgtgtggtaggaatgctgcttttctgaagaggctaagaaggaaaaatattttaatgttgagtcattactcttttacttttttggctttggaaggagcctctggtagccatggtgacacataaggcactgaataaactaagatttccctgatatagtatttaacacacccaggcagaaatcatctttattaatcaaaattctgtaatgggtacttcatttttaattctttttttccctttttccttctctttagatcttacagctaatatttgttttattttagacaaatgataccaagtatttatctattcttaactaataatcagtccatcagtattttcacgctcatggagctacatactttttttatattaatgacctgttttacactcctttggctatcaggtccttgaatattaattagaggccacctagcttagatatctacatttaacagtgcctgaaaagaatatataatggacactttatgaaaatgacataggagtttatggagaatgacagattctaccctctggaatgaaaattgtacagttttctctgtcaaccaacaaaatcagttatagaacatattcagggagttctaacgcccagatcttcctctctgggagacaggtaatgtggatgtgggagttttcctgttctggtcattgttgtctgtttgtcccatgttgctcttgttctcccttgtctatattgtaatgcttgcatctttccttagggcctgtttactaagcttagagaattgttactctttgcttttgtatctacccaagtccttgattttgaccagttgatttctgcagaaagccttgcttctagtatgctgtgcacattgttggctgcctgctttactctttggtgggaatggcgggtaatggctgcatgttgctgcagctctctgtcttagttatctggatggtctggacttgtgttccttgttgactgcatcctttctgaactattggtttttagtataccatggtatagaacaggtgttttaatccctttaggcaggaagaggccatttctgaacagaataagagctgaaattgaatcttccatggtgcaaagcagtgatgcaatttatgagggaaagtctccttcctttcacctcagaagtaattcacaagtgggtaattcaagagcatttccttctcccatattttgactaatacaaataacaagtataaagcaaatgaacatgaatgaagctataaatttgactgcttctttgtacagtgaggaacttgaccaggtcaagtctttgctatggaagtctccaataagataactcctaacatcttttactaactccagcttcttaggtttgaattgttcacaatattttgggggtattttgttttgcctttggaaaaaacgttagcctctagcaaatcccatttaaaaaaaatctcacagtatctataggaacataaaattcatcagagtgcttcttctataataacaggtgatttggtttaaagtattaaaagctatttgcccacaccatcccagcactcagtttagcaaccttctgttggataacattaaactcagtctattagtgagggtgtcttgcaactagcattattttttcagagctgtgtgtgttaattcaatgtcttaattgagtctattaggaaccactttatttttgttttgtattagcttatgccctgaggggaaaaaagcggttaaatttttttttaaaaggaacaagaacaagagatctcatagtctgcctattgcaatacactttttactcaggaaacataagcaatgaagaagaaaaacatttttcaaaagcaaatcatctcaaactgaaaaaaaagatgtcatcagtgtcttgataaaaatatacattcagagttaagcctttctccttggaacataacaactatagcataattgttacttctaagtttatggttaacttgacactggttgtctgtcttagaatatttagccatgccctgtctactcttctcctaagcaaaatggttaacaaatatgagtatgtgtggtgggaagagagtagagtgtaaaagagatggggagaaaaggagagtaaactaagaagcagagagatgcagggttatcaaaagcaaaagaagaagagttcgcctgctttgctggcaacccccaaaagagtcagaaatctgttggccatggagggtcctgacttaagtgtctatgactctaagagatggcatgtgttttatctgtctctcaggggcatctaacagaagacggcacaggagaaatgggtaatcctggaccagctgtttttcttcagccattcattcatgcctccacctttaccaaaaagcataagccaaatggtcctcttcatttagttaatagcaaagtaattttgctgaaaaccacattttaaaatatgaaatcaaacaccacagtgcaaagttcacagaatgctgttcctgatagtttttactctgtgctcaaatctggggtggggagagtagagaaatcaggcacactagttttaaccaactactgcatttttctaacccagaaccaaaatttatgaataccttcagagattgtgcttggagggcagacccttctaatggtttgttagcttaacagtaaaccactgaagctactaatttgcctgtaaacaccggatcccactggaattgccctacacagtacagttcaaagggcctggtaattgccctgttcttctatatggaactatttcaacccctgctgagactgagaagattaagaatgtaaagggaagtaaagcatcattttgtgtaaacttggctcaagacctacaaattatctgtggttgctaattgaactctttatttccgctcactgaagctcttcagtaggtaatgcatttacatggtttttcttcacacaactgggtgatctgtgtgccagcctagaggcagtgccatcctttgtaactgcccacagaacttagaaggccattgcaaagactcagtgaatgttgttcttgactgtacaacacatatgagagcctcttttccacctccacgagtcctaggtacttctttttctctagggattttggtactacttgtaaagctcctcagaggaaaagtggaaagtcactcctgaactgatgtggcatttccttccaaaacacatccctgaatcttcagttagtctcagttaaagcaattcttctgctgcagttttaggtaaatttcttccaatttttagtattatattgatttacacaatttaccatttttcaatcagaaacactgaaatatcagtgatggcatatggtgtaatagaatagaaatggagactggctgattcctagtctatcattctcttatgtaagtacagattgataaattactgcttactcctttcttagaaatttcggtgcctttatttttctccgctctccgttttccccaccttctcattttttttccctctcttccaacttctgtttgaaatgggtgtgagtactaaacacagatatcctcaagggtggtctttctctgcctatctaacacaggagagaagttaatgcaatcccaaatgaacactttaccatgttttttttccagccaggatacattcaagaaatgcttacagcataggtcggatgcttcatagcctccaataattctctcacgtaggtggctaaaatgaatagaaaaagaaaaacaaaagatgaacatcaaaaaacatctgactcagccaaataaatgaattttcgaacattgatttttgattaaagttgagtattgaaagcagacagaaaatatgaaatgtctttattagtcactttggaagtacaattcttagcacagtttgaaataaaaatgctaatcgagaagagtacttttcccctcattttaccccaattcatcagtactagatggtcctcattgtgaaatctaattattaaaacttggctggttctcaggagttcactctccaggtctttatgactatacatttaactttacctgccgaagttgggtcctttccagtcagcaagcccttggttaagacaagatgagaaaacatctccaggtgggttgagtatttcatcactggccaaattgttcctgattccaccttgtcataacctcacatttgttctctctcatgccatacacatggaaaaggggaaaataactctgttcttttttttttaatctcttcttcctgggaaacagccaaacatccttttatgatcaaatgcctgtatatctggaggccattggccaccatccaaacatttattggtcactgaacaccttgcatgaggtaatttcaattatcttattaaaccggaacagagatctggttgtgtttcctttgattataaatgtaactcgtgttcttattactgttaatagcagcacatgtggggtgccagtagttttctgggcactgtcccatacgaactgctgtccagtgtcttttgtgaaggaagacaccaggaacaaagaagttgagggtgagactactcagtctttgtttattttagaggaggggagctaggatgaagagttgcatatggccaaatatggtggtgatgtttcatagcatggcaaaagttcttgagatttctgtgagtcctccagaggaaagtggagtatgtggaatatattgagggaaaatgactatcaattattttgttgatacagagctttatttttggacacaaatgcttaagcaatggcaaaactatcaaaccaacaggtgttatgaagtataacacttctcctcccagggcttctaagttctcccactgataaaattatttaactgcttcatgcttttgaattaaatgcttgactttatttgcagaataaatttcaagaatagggtccatactataagctccaggtgatatgtttaaaaagtatagcaacttgtaaggttgtggggaggggagttgagcagccccactggggggttctgagatggtacagaaggatagtaactgattagaggtgcagaaatataaatagaaaatcttagtgcctataatggggatttatcacaaaagaataattcctttcccactttggtggcctttatactggaaaaaatatcccttaacaaaaatctgcttataatttatgttaaaataaatatatgtgttttaggatgaagagattataggatttgtttcatcctaacttagaattttaattgtcattactatattttatcattttaaaagatgacaaattgcctatctctataaactcattttttgggaagcactagcttaatagaaaaaaattcatagtataattaagtatttccctgccctcttttaaaatgtggaaaagtgggatttattcaatttactagcttaatttgagagtagaaagaaagtgcagaaagttcagtaagattcattcattagctatgattccagaagagtctggccctgggcctttatgctttcttcaattgaatactacacaaaagagtaggcatattactacagagaagagtaagaatgtagtcttctagtgactacgagaatatggaatttcattgtttcctaccataattgaattatgctaaaaaacccagcatagcagaaaatgacaggagacatctaaaataatctggttggagacattgctaaaacattggagatattaagtattttgtaaggagttggtatgttaattaaatagaataatgtatcaagctgtggatgattgaaatactcttctgccctctttgtagctctaacattggcaagtctcatgttgagttgatttttttaaatcactgcataaatagatttttaaatatttgtaaacttatttcattaatcctttgctggtccagtgtcatgaagctgcgtaggtccaaggaattaaaaataataaatagaatctcttgaaagagtctttctgtggttaaaatttaccagatgtgactgaactcatatagtttttctgcctacagttacattgcagtgataaagtttctggaggcttagatggaatgcaatacatttagcttatttaaacttttgaggctgctcttcaattttgacactgttcatctgttctttccatatctgtcagagtatttcaggctctttttccttcacactcagaagattgctgcctactcctaaattgtcccctatcttcttacctttaagtgctagttgattcaattcatcctctacactgcctttggattaataactagaatgctgttgttatttcaatcaattccctggcttataaaacagaaaattcattacttctcattgcattccagatttcttttgcagatattcaaggctccttctgtcagatcatcacaaaaatgtgtcccaagctacattttggctcaagaatagttggtactttttgttttccttgagatggatgctcactctgtcacccaggctggagtgcaatggcacaatcttgactcactgcaaccgtggcctcccaggttcaagcaattctcctgcctcagtcccctgagtagctgggactacaggcatgcgccaccacacccggctaatttttgtatttttagtagagacaggatttcaccatgctggccaggctggtctcaaactcctgacctcaggtgatccacccaccttggcctcccaaagtgctgggattacaggagtgagccaccgcatccagctgaatagttggtatttttattctaactctgctcagtgtttgagtccttgtggctttcaatgatatagcctcttgaacccagacttatcagtcctactcagtctctgggttacaatgccctgtcaactgtagcatgcatcttggctaaaatcaagtttccatctagattctggctcattgtttctcaaacagggactgtgacctccaggagacatttggcaatgtctggaggctttttgttttttcgttgttttgttgtttttgagacggagtctcactttgtcacccaggctggagtatagtggcacaatctcggctcactgcaacctcctgggttcaagcgattctcctgccgcagcctcccaagtggctgggattacaggcatctgccactatgcccagctaatttttgtatttttagtagagacagggtttcgccatgttggccaggctggtcttgaactcctgacctcaggtgatccacctgcctcggtttcccaaggtgctgggattacaggtttgagccactgcacccggcctggaggcatttttgtttgtcacaacttcgggttgctactggaatctaggggatagaagccagggttactgttaaatatcctccagtgcacaggacagccctcacaacacattttccagtttaaaatgtcaacagtgctgaggtgaagaaactctatagctctaccaatacaatttgtctaaatctcagaccagctctttaacatggtgacctgacaatttcgaacatgccttgcttttctcctcttctttgactttgttcctgccatttttgcttgaaatgtcttcccagccatctacaagtgcttagtttcaatctgctaattctaaccattctttcaagctcagctcagtttagatgtcatctactccaatgatcattttatttgacagtgaatgctcgctcctctgacagtgtttagccttgtctggtactttcatggcaggccaccagagtggttatgtctgtgccttatttcccattttagatattgtataactcaatgtacaatgtaaaagctatactatatggcaccctaacactttgactatgtgtctgcatagctttgcatgtttttaatcatagcagaaacacaatttagaatttatgttttttacctaacattgaaatatgctttttattatttatttatttatagacagggtctcactctgtcccccaggctggaatgcagtgacatgatctcagcttattgcaacctccacctcccaggctcaagcaattcttctacatcagcctcccgagtagctgggactacaggtgtgaaccaccactcccggctaaatttttgtattttttgtagagacggggtttcaccatgttgcccaggctggtctcaaactctggagctcaagttacctgcccacctcagcttcccaaagtgttgggattacagatgtgagccactacacctggccggattttattttttgacaaaataactaatatcttgttgaatatctttgctctgtagcttttcccttcttcatctgcaatattccctttgacccaattccaaggaatgatccaaatggttgtcatatttttattgctagtgatatatattgccaaatttattccaaggtgatttaccagtttgaattgcctgtgactaaggcttagtgtctaaggaaaccatatacttgaaagagtcagaatatctaggttcaggtgacagctctactcctcactggttacatggttttaggcaagccacctaatctgtttgacattttcttacctgtagagtggggatgtaaaactatatcatacagtcatgagcattaaatcagataatgtctttgggagtaagttgtaaaccataacactgccagtgctcattcaataaatgtttatttaaaacctactatatgcccgaatctgtgctaggaactaggaatacagagatggacacaatcttgggttcaaggaatcttcagtttagtgctgtgtaattattaaaatattgttttagttacaaaattgagaagaaattacttttttaaaaatataagggcttgaaagcaaaggcagttcgtacaacaggaaataccagtatgaaagcttgccaatttaataagatcattgttagatttctttcaataatatcccttggtcaatttatctctagcctaaatcacaacaacaattccttgctggagtatttttagtgctttttttccctctctcatatgtgaggacaacacttttcttactgttgtactcagatatgtatttttgttcctctttttttttttctgggaaaattcaaagcttttcttttttaatttcatttgctaccgatagcacttttttattgttttctgagccccaggtccctggaagctgcatgagggcacggccccacttgtgtctgtgctgtgactctcctatcaagactgctttgcttcagaatctctgggagtatttaggaactgcagcatcctcagatctatcttttggagatagatattgattttcctgcctttgaatataaaggcccagagtgagccctttagctgcttatctttgagcgtgtggggcatcggaagctgaggatatggaagtaactgcagtaaaatgcatcagcactggcagcgtgaggattgctagtgtgagcaggcagtgtggctgaagttcttgtctaaggactggaagctacaagaacaaattttccacggtcagggatagcttatttggataaagataattttaaaatattaccatttttgtgtgtgcctctgaaaagacttcagactgtaagaatgcaaagtatcgtttctgcctcatctaaattctaccctcagctacttgattgacctaatcaaatctgggatctttaggattttaaagaaaaatttccttctttctggatggagctctagaataaattccatcacattccaacctctttcccattgttgctgttaaaatacacctgtaattcttgattcattcttttcatattagatcataaatgaaaatgagccttcctcttttgatggttctttctctttccttcctctttatttttctcagaatcaagtaaaatagagtatatccttagttagagactcaggttatgtgcatattgcaatatttccatgcattttacttctgctttcaggtaaagcaaatcagagcaagcttaaatgattgcagctagataggaaggaacggaggcatgagagcaaaaagtacctgccacaattcacttcaacccagtagcaaacattcgctttccctcctccccccactgtgagtcagcaaaatataagaggaaacaagagttcagttggtggggaaaaaaagtagaaatctttgtcagtgtcttatttttttctttttcttattttagtattaagattaagtcattgggcgtctctgtgagatataatgaagaaacatcaattagcaggtttctccattatatcatgagcggttcaaagaaaaaaagataaaattcaacctttaattgaaaatattctttaattcctataccaagcatttctgctcattactcctatcttttgcccattactgataagttttacttcaaatttaagaaacaacaaaggctttcatccacaatcctttccaagcctgtaatctgttatagagccttagtttaaatttttggggagaatttaattattgatttctgacaagtgttaccacaaagcaaatactataaatataatactaccttctcagttagggccacttagcatcaagggaggacaacttgaaggcactggggttagatcgcctagtggtgggtagggtggtttgattctgtcaccgtccactccttgagaattactggtcaaaatcagtaaacctttaaacaatgaaggtagtgcagaattgcatttagggtatgaaagttgtggaattctagagtaacaatagataagacatttgaatggtagaattccctgctcccctctcccaatctccaatcattaagacatgctgaaagtaggaatccagtgccctaggttttcttgagatgtgcaaaacacccacatttcatcacaaaatctatatttttcaaccaatatgcataagactatacttctgcccttatgttgttttaactgaaggtgagcaacctccatgcagagccccagaattataaaggatcccagcttccctctatatgctgcactggaaagagtttatctgcaatttttatttatcctataaatggaagctttctcattctgttaacctcatgaagagattccatccttatcaagtattataacaagaataaaaacttttttctctttctgttattcctggattgggtattttctagcctttcagcctaacttaactgtatccttgccattttgagtaaaccttttatttattttatgtcctccccagtctgtccttctatccatatcttatactttcttcaaagtccacctcaaagtccatttttccttcaaggagatttttctgatgttgttaatcctattttatattaaacacttgcttcaatcttctcccagtagttggtatgtaaattgccctatatgtaaatcacatgcacccacaaatgtaccatagcatacttgaagacacagactacagcatcccattgagtatgtaatcagtgtataaaatgcctcttgtctttactgtggtttctccatagcacagctcttcatattttccgtccaagacattcatggtcctacatgtaaaaatttctcagtctgccagttctgtgtttttgactctgcctgtttctattcaggcaattcatttctatccttcttgacagtgtataccctttacatcctattagatactgttccaaacttagttttagaacagttccctcgattaatattatctccttccaatttttttatttggtttccttcaccacttgttgttacctatagttaagatttgagtggattgaagtattatatttaattgctgttttggattgtataatatccaacttaatttaagctttcaaattctataaagctctgaggatgtctttgttccctgctacatgggagtacctctgcaggaaaacctcctcttatttttgtatttttaaatcaagctttgtacacatcaagcatacaataggtacttacaaaccaactccatcttcacaagtggaaagctacagaagatggcttaggctttagcatgcacaatttacgttgaacataaaggataaattccctgataataaaactgattgaaggtgagaacaaggtattgaagaacaacaagaactctattccctggagatctctaaagggaaaaaaaataatttatcttggacagaggcggggcactagactagaagatatactgagattttatctggctctagcattttattaaaatcctaaacgataacactacttccataacgtgtttctggtaaggggtttctttttttttctgtcttaaatatcttcaacacaaataacataggaaagcctgaattatttttgtaataaaatacagtctttgaataattaaaacatagacattaaaacatagaattaaaactacccatttctgatgctatatttttccagcagtattgaatagattttgttctattggcttatcttcttcaaaaattcaagggaaaatattttaaaacttttatttcttgcttagcaaatgacagtaattctgagatagacattctattcttactccatcacaagaattaagtttctcattttataggaatgagaaaagatgaaaaaaatgaaaccgattgtttatttctacaacttatgctttctacttatggacattgatatttgtgtctacttgcatatttcttctgagcattaatttttttcccttctacttcatttatttttggttgttttaatacagtttccaattacagaaacaggatttctggggagaaaaaaacaattttaactgctcataagatgagattctgtggctttgctctttgcttttttgaatagctttagcttttatatttatatgattcttattagggaaacggtgctaaaagttggtacttgatactttcaggaaagtatatgcaagatgatataattaagaattctttgcagcctaattgatagatatgtattttatttaaaaaattagaatatgaatcttttatctcatctgcaactatggaacattgcctctgatagctagaaatattaaatgcaaattcctggaaaatcctcaaaaatcacttatttatgaaatagtagttttgaatcaatagccattaaaaactcttttgtaacaagaattgtcaccttattcataaaaatgtagtgtgggctaaatcatgtcctctaaaatataactgcaatgttataacagcctgatccgacatggacccttatctgttccctcagaatttgatgttggtattgcatgacacagggtgtcgttattgtgaatttgccattccaactctgtgattacgttctaagtgggaaaaatgactagcaggcccaaaacaaaatgtcctattgaagtgttagaagaaagatatgtttggattcatattgaatcttttcaattattttgaggaataaatgcaccaaatctcttgctttgaactttgttgccatattagacattacctctctgctctaaagtcccaccaggtcattgatactattgtcatctaaaatagcatctgccttattcaggataacttttgtaagttataaagcaacctgggcaatgtgaatgcctttctgaaaaaaaaacatgaggagatctcactgaaataaaaaggagcagaaagagaaagaagcactaagaaataactctattcttatatctggtaacaacttatttttgctaaaattcagaactatttaaaaacttgtattgacagaggacttctatttgttttccacagaatagttttctttttgcagatgattttggttcccctggaattgcacacacgctcattgttttagtgctaaaagtttgtaaggacatagataaatattaaaagataatgaacaaaagcaatgcaggatttttttttttcagaaatctaattctaattgcaaaaattagtttaagatgaaccaaggaagctgatacttacctacaactttaaagtgtatgtcctccaagagcatgcccctacctaactttgttgatagggccctacctaaccagtaaagtaattggtgtgcatcccccatttgccctgaatctcccagggaaagggctaataaacagtgactttataagcaagcaagagaagaggggccaaaggctgaacagcttttcacccggatacctgctttggaaagaaacccgagtttgccatgaagaatgataatagatagtagggaagcctcccaggcttgtatgctgctggtagcaggcagtgtattaacaaccaagccagaaaattttcacagagatatctcctaaggcactgaaaataaactgctgtttattttttcagggacagtcaaagcagtcaaatactttttacaaacattttcttggactctttgcttcccctctcttacattcttttctataaaaatatttgtatttctctgttgatgagttttaagaggatatgttaatatactagcaattttatttttctatttagaatatcctccattttttatttttatttttaaagggttgtagatgggagagaaatgcttagggaaattccttttggagttgaaacacttgcatttgaatatttccgcaatcattgatcttccatgcagggctccatttatcactttagacagccctgctcttggttctgtttcttaatatgttaccagaggcttgtcctactatatgcaaatcagttattttagcataaactcccctttgtgcatctgttaacagttattttactactgtctaccatgggccaggtgctatggattataaagaatgagataaaaatctctccacccacaaggtacttacagtctagttgggaagacaaatcagatacacacaaaattaatatgtagtgctatattaagcaccagcttaaactgatactgtaaggcactacattgtgcattataggaaattgagatgaagctctaacatctgataatgataaatagtttttttaaaaaaggctttaagaagaagttagtatgactggttcatcaaggaacagcatctaggctgaaggtagactaaggataatatggttaaggagaaagagtagttaaggagaaagagtaatagctaacattagagaagagacaaagataagaaagaataataaagatgttatttagttgcaatatattagtataacatcaacgcatttttttcattgtatacctataaattatgtatattttatatagaggcatgctttgacattgtaaaaccataaaaactgtgattgttgtgggtgataggtaaagaaagccacaggaggccgacttcttgaaaatatctttatgtagttcttcatgagatgctgctgatgagaaaagtaaatgcttatttacttgtatttgtaagaattgtttgtttaaaagcattttttaaagcttttggtgaaacatccttgtttagtgaccatgaatgagactagagaagataatcttttcagataggaaaataagaagataaagataaatttatttttagaaggaaacctactttctggataattagtgtttctatctgataaggagctaagtataacaatttctgggtcttacgataatctggtttgtcttatattgatgatggaaaaataaagtgaaataaactcactgctgaaataatgagaggctgtgtgggaaagaactcttgagacaagtaggtaaagtgagattgcgggagcaattgatacccaagtggagcccgttcagagtgacagaatatactaagtgcttgaaagtgtttgtgtggaaaatatacttccaagttactttttttgaacagtgaaagcttaactttaaaatgcaaggtatttgtcaacattatctgaaacaccggactggaggcaaatgtttcaacatatttgttttcttacaattaaagttaagctgacatgttgaaaagatggtcttcaaagatattcagaggctgctaaatttttgtcaataattagccttcactttgctttatagacaaggatgtcatatttttttctcctcacatttgccaagtaaggattttcacttttaaatttcctcatcctggtgtttgcatttaggcatttcaaacagactcttcaccctcagccaccatgtgtagtattgcatttatgcattcaacttcttactcaagtgatgctatttttttctgcctcagcctgacagccactaataataacacatgaggacagtcagacaaaatgaagacaaatgctgcttgtcgcagcagaatcataatgtctccagactcagtaaagacagtctaactgtatgtggatgctctttatagcttatttagacctgtggtttttccctgtgttttttttttaaagcacaaacattgtgcagaaatacattaaggcaacatatgggcctgttagttagccaaaacaatgtggaaccatggagaatagagattgcaaagcacagatggatactgtaaaaaattcatgagtggcataacagatctaaaaggtaaattttagtcaaaattcaagtggaaagcataggaaatacttaagaatttggctttatgaggtttttcaaatcacacaagatgaaacattgtgaatattctacagatttgtttatgccataatgtgaaaatcagagcccatcattcaacaataattatgtctatatagattcatgccatcagaagtagattgctgataaacaatagcgctttgcttctatttgatgtaaatgctgcagtattaaatatccatattatttccagctcaatattagaaagtgtcagtcattgtgacaagccaggcaagaggagctcattgagccgtcctctgtgtagccaagtgctgtcgaataaccaggttttcatgctatattactttgttgttaaaattgagttctaagcagtaaattggcaaatcattttttcctcttttacatttggttcttttaactatacctgaagcctcaaggagacgctggatttgtatgtgtatataatcaagatgtaccttgaatttttcagaacccttgttttttgaagttgtccgtactgtgacttatcattgttgtcttttcttagaaaaaaaaagttatgatcccagtataggaccatcccaataaaggtgtgtctttgaacctctcactacagcccatcacattcatagaatatccttaagagctatttttcaacaaaggaattttgcctagtgaaaaaaataatttggttcctaaatttttgctggggtgagatgggggagaaagcagaaaggaaaggcaattgttctgtatatctggatttctaatgaccttaagtgaccttgtaaatgaaagctgcctttaaaaacacaattaagttctaatcatagaagcatttcccatatagaagcttttttttttgtatgtcaggttgagagtgatatcatgtgaaattcagaaattcagatatgttttgtctttttgttgctagaaatttaaagggtagtaaattattctctgtatgaaggtttaggcaatattcaaggtgatctgctagatactttaaaatcttaaacattgggtagacaagttgtattgaacttactttttatagtcaatgatactgttaatgaataaatttagagaggactctgttatatcttgaaaagaccagtacattatttaaacaaccagagagttatttggtattaagaagaaagatgattagattgaaagattgaaagtggacactatggataggaagtaaatgaaaccacttctttaactggagtagtttttaatttttgagtttttttctataggtaacataaaatagggatgggttttgtagttggcttttcattcttggcactaatgccactgttgggaccttgagacagcaaattgaactttctgatagttgtcctaatagctctttcaggctgtatttggtgtccttagtgaattaaagtttgcattagtgaacccactgagcagcggccaagactaattctcggctctgtatgacatttcacacattgtcagttcttagtaagtgttatatgataacattttgagattctcatctgagagttgatggggaaatatcaaatagtgtatatgaggtttgccaactaagatgagcccagttcaaaagtatgttgtaggggataggtaaagatggcagtgttttgtctccattaaataaaagatagatttactcctgaaatttaacaagaaggtctgagaaagactataagcaagaaaaaagaatgaagagacagagaaataggtaaaagtaaaagggatacaggtataaagggaaattatatttcttccttaccaattataccttctgtccctatggtgattctaagaaggatatggaaaatgtcagatatactagaaatatgtgtgtatgtacatatttaaaagcatatatatgtaccttctcctactaaaatgaaagcttcatgagggcagagtcccttttattctcatctatccctaggacctagaagattacctgtaagagtagacactcaaaatatatctgttgaatgaattaacttcttaagaacataattttccatatgtttctactgttatctaagcaattatagatatgttgaactctctttgaaagtgttagtttggttaatacttaagtcacaaagattgatgcaaaggagcacatattagcttagagacatgccgtctcagatgtatggagagaaatggaatagtggaattttaaaattcagttgaatgaatttgtcttcttcctctgattaagagccccataatgatcaggtcacttagtttattcagtgtggaagacagagtgggtggagggaccacccagcaataaacatacttgataaaaacatacctagtgcttttctaaaacaactacatgtagttataacattacctgcctcctgtgtttaagtatgaggagcagaatccgctggacattttgaaggcaggtcggaattctccgctagcagttttgaggacaagttgggttgtctgaacaagtctagaactacaatttcacacctatgtagccagagatgaagaaggacataaatagtattgatggtcaaggctttttaaattgattctccctgctgacagtagactttttgcttttttatgggattcaaattatttaattttgtttaatttatgtactctcagtacattcactacagggacatgtgagatgtagttggttgcatttgacattgtctttcaatacaacaattttacccaaatataccttgctaaaagtcaccgaaagcagaatctgtgacaggaaatgcatgcttttattctgatcccatcttgatacatgtcagagtaggtaatatacatgttaatatccattttatttgttattgctggtacaaaacatgtatgtatatatatcatgttttaagagaaatattaaaaaggagacaaacgtactttagttcaagaaacatattttgaacacttattatatgccaggcagtgagagattcattgggaacaagaagaagtaaagttcttcatgtatattttagtcaaggagaaaaagcagactttaaataaataactgtaggtgttgtaagtgttcagagaagggtactatggaagtttatagcaaagtacattaacttagatcaaaagcaagtcaaagagaatgacagattctagaaagttatgatgtagtgagagggagagagtgaaaagaaaccaacctgtctacctacctccttcattccctccattttttccttcttcaaaaattgaatatttaatagatattgattgaatatctatcatgtgtccagcaaagtgctcaactctggtgaacaaaaacaaatataggttgcatgaaggtgacaaaacactcattaaacaatcacacatgaaaacaaaattgcagctataacaaatgccctcaaggagaggcaaatggtgccacatgagcatgaattgacttggcctggtttgaaaggtatgatttccttgagaaagtgatactcaagctgaaatccaagagataagttggagttgactaggagcccaagaaggctagagcatattaggcaaagaaaatagcatgtgcgggggcccagtggcttagacttaaaagaaggctaaagtggctaaagctgagagaacagaagtgccaagatgagaggcttagtgaggacacctggagaaccttgatggctgggttcagactgcagaccaagatgcccatgaagggtttcaggcagaggttgtatgatcaaacgcaactactttaactatagtcagagaaggaattagatgggggcaagcctggaggtcagggcactgggggtggaggctaccattatctaggcaatgcatgatgatccccatgagcctgggaatggtgaaagaatgaggagaaggaatgaacttaggaaatatttagaaatataatttatgactgattggaaacaaggtataaaggataagaaggagtgatagacgatgcccacattctcccttggacagcaaagggaaggtgatgccaatccataagttagggaatatgggaggagggggaagtgttagaagggggtgggaatagtgagctccattggatcatattgagtttgaagtgtctggagacatcaagtggatgagaaatcatttggacatagaggcctggagcccacagggggattagtgaacagatacaggtatgggcaccatctgtaaacagatggaattgaagcaactcagagtctgggtaaggttgaaggactatgtgtaaaaacagaacaggtctgatttatggataatgctactacttaaagattgtgggaaagaattagcagtgatagagatgtagaaggaaaaccaagggaggataatgccagtgccatggaagccaagagaaaaagagtgtttcgggaaaaacagacaataaacagcatcaaacactgtggaaaatcaagtaggaccaggcatgaaaacatctattataatcaagaggattatggtgagaccatggtgaaaacatttttggtggaatgaaaagtatgcaaggcatattgaaatggattgatgcgccaataggagataaggagatggagggcacttatcatttgaagagtttgtatttaaatgaatgagtgaaatagagctctacctagaggaagatatggagttgaaaagggatgtttttagatggccaggagttgatgagttagttacttttatgtgattgcaagtaatggaatacctaactagtggtggctttattaaatacctttattatttatctcatataataatacttgagatgagtggattcaaggttgctgcagggcctcaaaaatatactcaagccagattctccctgtttccactccacctttttttttttttttagcatgttggctttgtgttcatgtgcttgacatgtaatagacactagcaagcttcttcagttccacatgacttcatttaaagcaaaaacaaggaatgtgatttttgtgctctgtccttttatacgggaacaaaatgtgtccccagattttcctcattcctactctttcagacttgtttttgtatcgtcttgtacacactgagttatttgcccatttctaaatgaacaattaacaaaggagaatgcagttatcaaacatggtttacatcaggggtaatgaacctgcagcatcagcacctcacgggaacttgttagaaatgcagattcctaggcttcatctcagtcatactgaatcagaaacttgggtgggacctagcagtgtgtttcaaacaagctttctaggcaagtgatacattgttcaaacttgagaaccattggtttagactcatcaggtcatcttctggtgctagagagaggacttatattcactgagcttactgctttcttatgcctgttgcagacacagaagagtgtttgccaccactgactgtatttcaacatcaagtaatcagccagtaaagggacagaatgaagataagacagggatgaactgagaaaggagatgagagtgcaagagattcatgaactcagattccacctccatgttaagaagaaagcatgaagaaaaatgtggatgcagaagcagataggctgctaggagcaagattgtaacttctcttgcattgggctcagatgaagcctcctggcagggagggaggtgtggtggaggtaagagctaagattgtggagaaggtttaaatctcttcagagaagcagggagcttgctaacctggaaacctctgaatgtagatgagatcatggacctccctgcgttggtaaacctgagttcggagtggactgagctgcctggctatgtcacatgcaacagaggacacaggcttgtagctgaagatagtttgattactttagggttgaggctttgccaagaagagtgtaacagaatatcatgagcgaggatacttaggatattgttaagggagagattgaagtgatgaaccaaggagttagtgctgaagaggagggagagtgcagatggggtacaggggagggttagtctatgagcccaaagtcacgtttctgtcttcctctttatacatttagtaagaaccattctaaggaatggatcaaatgatttctgtattcttaagaaaattacaagtctcatttgtattatgtcctcctctcactttatcatggaaagtttgagatttgtttgaaggtgtcacatttgcagtgaattgtggcaaatttttccttacccctcaattgtaggactttatgcaggaaaataagccagaggctttcatttggcttaccttgactgctttttgacctgttttgtttttctttactgatggataacactttttacaggcatgattttgtaggccgtgcacaatcttggtaagccatatgtataatataagatagaacactgacttttatccagctggactttttgtgctcttatcctagcagagagatagttacaatttcttaatgtacttgataacttgaaaaatattaagattttatttttatgaacactgtctcctaagagctatgggatggtccttgtttgagaagacgattctctgcttatatgcatgcaaagtagccactgtacatctcagctgtggcccatactgaacctcaagcctgttctctctgccacctgacatgttcctccctaggttgtccttaaaaagtacaaaccagtagtaatcatattaattgaaaataattaggcacacagatttcctgttacaaacatcataaagtaaattccacaaccagaaaggcattacttttatacggtgctgtgttttggaacatctgtcgtcgacttcttttatgttccccagtatctagtgccggagcatcaccctctccgtgaatgggactaaggaacagtgagatgcccacagctagacattcacgatgggagtagagcataatgagactgtgttcctgttgaactttgaatctgattctaacagtgattacaagagagaagagccaaatactttgaatgtcaataaaattgttggaatataaattacacaagggcaaggattttgctgatttattcatagctgtattcctaacactcagaagaagggctggcacatataggtgctccaataatatttgttgactgaataagtgactctttgcagatcaatattcttatataaattctcatgtctgtcaataaaataggtcatatatcttggtagtaatgttggtagtggagaccatcatttccagggaatgagaaaaagtcaaaatacatacagttgctatgaatgtttatataaacatagatattagaatcttggccaggcagtttgggtgttttgttatagtggtagtttgtgtcacagacaaatttcgttgaatataagatgaagaatctataggctcaactcaatacataataacttagaatatacctgaggccttccaaagaggtttttcattccatggagagatggtctttgctgtaagacaccagagaactgatctagtgcatggatattaaaattaggtagaccagggttcaattttcccattctaccacttgctacctgtgtgaccatggacacattttttaacttctctaaactttggtgtccttcatctgtacaatgagaatacttatatctatttcatagtattattagaattgaataaaatatatacaaaatacttagcaagtgcacatagtgagcacttgataaatggtagctgttattatcagctgtaattagttcttaaagtctgcctacagatttgtttatagatgtatataaatccatacctatgtttgctggttctaaattcaaataaagtagtgtaaattacaaggttgctaatgttgaacattaatgttcattctagatgaaaacatgaaaatcttacctcctccagcaactaatttaatctggttgattaggaaatgttcctttatgaaaatgatccattcacactttaagtggatgtttacaggtgtttagactcacactgagcactaagcttagacttaaactaagggtggacgtcagatcatttgtaaacataaactatgctatctccatgagaaaaatgacctttcttcaaatcccttgagtactatgattgtcattgatttgtataagatgagcaatcttcttttccaggctagatcattggtttccgtattttaaataattaaaatcattcagctcttacctaggaaatactagctctacaatatagtagaattagatccatagatcgccttttcactatttttaaggaatagtaataaaactagacactatttggagaaaagaaaccaaaatagcgaggaggttggaaattacatcctttgctgtttgttggagaaactacagatgtttgagctaaggagatttaaaaaaaggtactggagataagagagtgttcctagtatatttgtaaggatgtcatgtagaagtggatgaaatgacacctttgtattcacagagggaagattaaaaataaataggtagatgttaaaagatgtcacactttggtattagtcaaaagaaccagcatatgtaaaatacataataatgtttccaggttccagcaagctcatgtccttcccaggcgaatgtagctggttacgggttgagtcaaaacccacatattgtcacttaaatccaggatggtggtggtgtttaaccctatgctatctcttggatcttcaggaagtttagatcaactgtttagggacttgtactgtagagaccaagcccaacgacctagttttctacacgcaaattagttttattcaattctgcaaccatacccaacatcatcttcttagccatctatcttacagttgatgctgttgattaaaacagagcacagcatgtactgaggtgtcaccattaatgaaaaagcaatttacaaggtacttccttttgaccatgagtgagtaatgtcatccttatatgagaagaacagtatactgattttagggtaagttgtgaagtttcccagaagcaccatatttatggatgtatttggatctctgcctatgaggatgagcaatgaggaagttcaaaagaatgagctttaagaaacagaactaaaaaggtacattttgaaagttggatgttatgatgatatgtgctgcctggctctccactgcttcaaagaatttgttctaaattgtttctgttttccatgtttctatgtagaaaattgcaaagctaaaatttcttccctattgcagatgcccttggggactaaatcaagagtctgagggcagagtgaagctcaggattctctgcagataaatggctcatctggtcagctcaatagggatgtgaccccttcatcatttagatacaagggggtgttgttagtgtcatttatggagctgttggtctagaaaatcaaagcgtaatctggcttggtattttaaaaacctcaggaaaacgaggcttgatgaggattgtaaaataaaaggtgcttgttgttgctcttgcaagcacttagatcaacccagggtcaaaatccagtggtataggacaaagagcagacccagtttcctgcctctatttcttccccttcccctcccccattcttcttttcctccgccttcccttcagttcttctttccttcatttttctctaggaaagcaaagagtaaaatattttcctaggagtagagaataaactggtaggttatagttgtctttgacttgttaacgatcacactggctctccttgggtctttgggtcatttatcatgtggtcctcgtctaggatttgatcagattcttagagcatgggtggcctagcagagtacatgttatggctcgagttctaataggatttttccttctcccctctcccaactacactcccactcccggggtgtctgcactgtgacaagacaactgttcctcacccagcagtttgaaagcactgattttgctgacactttgatattattctagagacataagccaggcaacagaactggcatcagatctcctcagacactaacgtgagtgcccagggaaggttgtagatgcacatttgatttccacatctatcttctccctgcaaattaaattattaattttcccgcatgtcttcttgtttaatgagaggagtggtggcctttatctgtgcacgtgtgcaaacaaaacatcacagcaggggctcctgaactgcccagagaagctgaggggtttaagcagtcagatgcaactgtcttggtacagtcagtgtcatttgccaaagtctgtctggctgttggcatcataaacatggaagcatgcagactccagtgcatatcctcacatacatatccgaagatgaaagctccttttacaaatacaaaggaaagatcaaaagaggaaaaataatggcatttaaaatgcacgtgggaaatgcaaaattatataatgtgattgtttttctgggttccattagagtggtgctattttctgagatgataccgtgttggttgattacttttccatgtttgagataataagtactcacatcaacatgatttttgatttgttactatacaagttctaccacatctggcttttccagcctctcatgttaacatctcactagttaaatacatgtattaacttttcctggtctttagtgtcactgaataccaggaggtagctctgatttggcaaaaggtctacatgtattcatataagttgtttattataagaattacttaaacataaaaaatttatatattgcttttgttcacttaaaggccattaaacattctttgttttatttcatgctatttgaatattggaattgctgtcgattctagaacaatgtgattcatgtatcctgattctagagtgttgactttatggctgcatgacatagaacaaaatccatcttagtgattatgaaggattttagattgctattttaaatatttgttatctctcgcctttgttttataaatgtcaatatcttctttagggatctagagttcaccttttctcatcaagtgaaatgatgtatccatttattaaaattgaatgtgaactgtaaggttgacctgaatgaagagtcaattttgatgattctttttttatattttagaagctgttgagaactcccaaattaagaacatgataatctctgtgggtcccctctcctaaccccacctattacttactctattaaaaaaatatgattttctgaattgttacacagcctagccttcccatttttcaaaaatgatgtcactcagaagtccatgtgaaaggtattagtctgatcaactatagcatttttagtattactcatatataatatggcatataatgtgtcatatcattttatgtttgagaatacatagttatttcttaaaaacattaatagaaatgagaatcagtatataaagagaaaagtacttttcttgtataggtacatctaaatcatttataaaggaaaaaattccacagagctctcaccacccctccactgggcagaagggagcaatctttcattgtcaactgtagtttctaataaaaggagcgagtttgtacagtcattgcttaacaatatattcctttgggaaaaaattggtttccctttagtaaaatgttcctgtgcatttggtttgtgttgctatgtaagtgtaattaaatgcacatctatttacacagcttgtgaggacttattagttggttttgcttgcatttcataagaatatctggccttaatcactttatattttcataggacaagtattatgaaaatctcattcacttgtaaatacatgaaattacaatctctaggaaaatggtttgtaaaaccattggctggtttggaataaatctttgctaaacctcaatataatttattaaaagtaccatgttgactccactttgaacagtggcctcatttctcatgttctgtttcaaaggagccctctgctggacagctctgtgtgatatcacatgcacgcatatatttatatatgatttataggctatagttaatataacccaaaagccatttatgattgaaactctatcgttgcaaattgaatgcatcactgaaacctgttttgtcatcactttttcatatttaatgaacaagcagttgtctaaaaataaaatgttcatccttaaagtttactgtaaatcactgtacatcagcatattcccacacatgagataatcgtactaaatgaacattcattaccaataattttagtaatgaattattcagctgatatgcaattatcacacacatttctaaagcaattactttattacataggtattccatgtcattgattttacttgtctatattacatatgtaaatatagaaatctttgcttttaccatacgttcaaatgcaaagggatttttaatgtttatttgttcaatgtcatcaagttgtgaggatgtatggttagtattaactacattttaagaaacttgcaaatgtcagaaaattgctgtgataaaatgaggcaggaacaaataaacacaacccaaaaatcgtggaccatgaggttatagaaatggtatgtttttctgagtagcttgtcagtaggctcatattattatcaattatatttttaaagctgctgttattcaaggcaatgataaataacgacttgaaattatagtcccatgtacatttagcctgggaaacaagatggtatagggaaaccacacagcatcataaagcaaacgcagtctttgaacttacagagactgagtccaaatcctgcctttctgaccctgaattatttaacctcatctccagaaacagtctcagaaagttgtggtaatgagaaatggcataatgacatatgtcaagtggctagcacgtgaccaggtaactttgaaatgggctgctggaatgttctccatacatttggaggcaactactttgtttctcagggcagacttatattgcttttcttagcaagcagcagccaagatagggccttgtactcttggacttcatttatatgtagcacactaagtattatgaaacagaagtcataagtagtgtgataattgttttaggcaatagctcatctttcagactttggagttaagccctaactctaggtcaaaagcctgaaaacagccttttctgtaaaacagcataaccaatgtgagccatgaaagtttcggtcactgtagacatctttttaaaaattattttcaaaatgaatataaatgattgtttcagaacagtttaataaaacatactaggccgggcatggtggctcacgcctgtaatcccaacactttaggaggccgaggtgggcggatcacctgaggtcaggagttcgagaccagcctggctaacaaggtgaaaccccgtctttactaaaaataacaaaaattagctgggcgtggtggcaggcgcctgtaatcccagtgactcaggaggctgaggcagcagaaccgcttgaacccaggaggcggaggttgcagtgagccaagattgtgccattttactccagcctgggcagcaagagcaaaactccgtctctaaataaataaataaataaacaaacaaacacagtaatcaaatttctgtagttggccaggtgtggtggctcacacctgtaatcccagcactttgggaggccaaggcaggcagattacttgagcctaggaatttgagaccagcctgggcaatatggtgagaccccatctctacaaaaaatacaaacattagtcaggcatggtggtgcacacctgtaggtccagctgcttgggaggctgaggtgggaggatcacttgaacccaggaagtggaggttgcagtgagccgagatcacaccactgcaccccagcctgggtgacagcaagaccccatctcaaaaaaaaaaaaatccatagttaacaatgaaatagaatgacaaatggcatagactgagaaagtattgtcaagtcactcctcatttgttctgtctttgttattcacccattaaaattcacactgcaggaagttgattctttcttttgaacactgtttttaaaaaatgctacataaagctttgtgttagcttatatatgagtttttaacagaaatataaacaagtatcaagaatatagtacgagttgaataaattttgtttaaataaataaaaattgaatgaacggatcattcactcttctagcagaagactttaaaatattcttcagtagatgatgcaccaagctagacttgcactgggaggaaaattgtcaatacagagctatagggccaaagagttcagtaattttgaggggggtgtggttgggagatgggaacctatacacatagcagcagcagaaatgttttcaaggtcaaaaatattgggagggaatagactcacctgcagattggagatgtttaattcagtgatcttagtctctcagacttctgcaaaagttatgcgtccaatgtgaacagaaacacattgtttctactcatcaaacacatcaaacacatctacaaaacatttgtccagtgtgaaatccatcagtcataacccatcagccatcattaagtggatcaggtggaaaatttagagagaaagagaatagatcaaagggcaaaacctggtcaaataagattggctaaaaagttttaggtttgatgagcttagctagccttaaattgaatatttgggatattttaataaaatttttgtaaatgtcttttaaaaataaaatcatgttgctgtcattttggttttctattttgcaagtgttctgggatcatcctgtacataaaacccaagttaagagttcataattttatgaagtcctatctttgatatttctctttcagataatacattaatttttaacacatttggataatttcctgcctaaatatgttgaatataatagaattctggatttatgtcacagagaatacttgattttttttaaccattcatgttaaatgatgatcagatattggctaatacagagcccataggcttccaagttctaggcaatggcttaggccctgggactacataaattagatttctttacccaagggtggagacagacaaatgtatataattaaaccaaacatgctaaatcctatctgcccccctatgtcctgtccctttcgatgtacatagtgttataatggctaatgagtatgatgttatatttaccagtgccatgatcatcttcatcatcatcatccatttatattaacagtgtacacagaacaagtgctgttctaccttcttgattttatacagagcagtgtcccttgaggcctcgcagacatcacaggttgtcctaataaagggccactgtgtctgtgagaaactgctggtgccctagaacagtaattctgcagccgatccagccagccataaaagaggagtcaggcacatttctaagaaccaaatatcctttgactcatttctttgcagttacacaaatgtcagtatgcctgaagttgagtcatcttagtcatagaaggggagtggtggaaagaaagcatgaagaatgggtgatttcgagaggtgactcctttctcgtgcatgtaagtttaccgtcatgccagcaagtcctccgctgaccagtagatgcatgcaaatgttatctctaagtaagacaaattaaacatagacatgtgcttcaagaagggcttcaatagatacatggatttttaaaaatttataatagctaattaaggggatcaaggggcaagtgtggtatatttcaacacacctttaaaccttttgacgttaatattttggacatattaactgcttatttcaatgactgtggcatgtacacatcagtgtgctagatagcggaaacactaaaccacaaaaagttccttcctgaaaagtctccccaaatctgttgtctttatcttgtttcattgtgtctaagatcctggaaatgaaactgctgtttttataaagcagcatttcaaatattgtctaccattctgtatctgtgttcctcaaaggtcagtgcatgtatttaaatttctcccacatattcaagcattgctgtgtattttcatccaatttacaacctatttcttcagtgtgaacaattaattttcctgaataaatatgtatatttggttcggatacccttgaggctcttggggcacaattcagatgcatacatggaaactgttcaactaacttgcaactagttagaaatctgagaaaccaaggacattgacttttttaattaggaaaaacaacaactcttccttattgaaattctagctgttgtgccttaatttcctattctgatgttttcattttgaggctagttagttctggcccacactacccctacaattttgcttacttttgggcttttgaaaaacgtgtaaaatcatccaatgagaagtaaaaacacatatggagtaacagcctctagtggtgaccacaagtctgtgagcctagaggctgcagtccatgacatgcacgaaggcagcgcaggagttaggtgattgatatttgttgttgttgttattttatttctatcattcaaagctatataagaaggtatgatcagtttctgttttgtgttatgtcttctaattagttgatctcatcagcagtctgatgagggaactggttttaaaaattcacagagatggtgatttctaatgtagattcctaaggcggtatagaaccaatttttccaagcttgcctgcttggggaagaggaaacagtgctgagaagttacctgatatatctgtggccatagagaaagtcaggttaagaaggacatgacttataattgaaacccttggtccctgagcttttatccacttaatagttttctaccatctggattctagagtagagtattcaaggaatccaattgactgtcccaaatagagtggcctttaatcttcccacaagattgataaagagagggagagtcctttactggaataaatagcccttccttttgagaggacaaccacttcaggattgagctgggttgaataatagaaaagaaagtggcataatttgactttgactctaactattgagtgatggaaatattttaaatacttgtagcccacatagacactgtcaaatcgacattatggactagtatattcacatagccttacagaagtaatgaccacagccagggcttccctgtcacaacttttcagatgtggtagggtagaccatgtgttcaaggaccaggagaatttgccagcctctcaccaaaatcttcatacattccaaggtagcctatttcttcccccttattttccagtatatttccagcattgtctgtttatagttgttaaagtgtacaacatttaagttggctaggaattttataatgaagatgtaaaggggaaattaagatagaaggcattgaagtgctgaaaatacactgtatcgcgtttggaaaataatatatgtatgtcagtcaaatgaagatagaaattttcttgatatttaaaaaaacaactgataatgtgacttcatgtgaaatttcttgatgcttactgagcataaaaaacataaatgataatgtgatttcatgtggaattcctggtggttactgagcatagaaaagatgacatgcattgcagtgagacagatcatactcttaccccatttttatgtgttattgaaataaagtgctgcatgtaagcagcttttccatagtgaagagcagtaagactctccatgtggcagggaaatgtaacggaaggcgaactactgctgaaacttacctttcctggccgaatgggggaagcacagggggaaaaaaagacatcatagcaagatttttcaatagttaaacagtagcatgtgaaatggaggctgaattgcaaggctgaatcagagacaaggagggtattacagggttgtagaagaattgctcaaaaaggaaaggataactgcatgataattgggcctttgccgatttggattcttgtgttattaatggctcagctggggtattttattagcaacgattctaccagcttggggaaggcatctagaatccatgctcagaatcactaagctatcctgcctctaactgtggtaataaatacatggtatactctttcaccatcaattttacctttaagataaaataagaaacaatcattcccacaatacgtaaaaattttccacgttggttaatagatgacagagatgaaatgaaaggcatgggcacacctaaaataaatgcttctatttttgcttctgtatgacatctccgacaagcaatggattttagcctgttgttgactgtcagtgacatacctacatttatgaaatttttcaacaccatgtaggcctgtggtgctaaggtcggacatgtgaaatacatgcaggaattaaatttccacaattgttcaatttccaaacttacccaaattaacaaagcaatacataatattatcttaggaaaatagtacctgtctttaaaaaaaaaaaatccaaagcattttgcagaaactgtttttctaatacatcttcactataattttgtgaagtaaataggacatttataggcagtatttattctacatggtggattagaaagctatgatagagagagactaaggctgtgcctgcataagctacaaaaaagaaaggaacattcacttgtgtatattaggacgtttcatactgttcccagggggcaaatatgtagtttgtctagataaaataaacagttgcatgagtggttataccttgaaattcattgtagtaaacacacaagaaaaaggcctgagtcctgcatctctgagctaagatatcattctcttcaccatggtcatagtgtgaggcatgaacttgacctacgttcctcagagccgagtttctatttggaattgtggccatacccatgcctaatcaatgaatcttgaggaagaatctgagtactgaaaaataagaattccaatgcaaaacaattttaaatagcccttaaatttaaaaataaatgaaacatttaaaaatgataaattaagacaatttcaaaaaatgtaaaacctgcagaattcccaaccagttagtgacagaaagcagtaactcgtcagtgctaatggacggttaagtttgctaggtgcctaaaagaggccagaaaccaacctgagtgaaaaatttcctcggtttgttactcatttggaaggaagataaaaaatggaatgttacggctgggcgtggtggctcacgcctgtaatcccagcactttgggaggccgaggcgggtgcatcacgaggtcaggagatcgagaccatcctggctaacagggtgaaaccccgtctctactaaaaatacaaaaaaattagctaggcgtggtggcgggcgcctgtagtcccagccactcgggaggctgaggcaggagaatggcgtgaacccaggaggcagagcttgcagttagcccagatcgtgccactgcactccagcctgggcaacagagtgacagtctgtctcaaaaaaaaaaaaaaaagaaaaaagaccattgtgggagagtggctgattgttgaagccggatggaacctgtgaaattacccagctcctcatgttacaaatgagcatactgagaagagacctgatcctgattcaaggtacttgtcactggaccatgttccctttcttgatgatacacagaggatgctgagatggaggacatccccagctcagggtggtctcaagcctggtgagggggaagctgcagtaaattctagtgtccaattcactgcaaccctgtcccccgaccaagggtgctgactactttcgttggagtttcatgccacagaaggtattgaccaaagtatgattcagggtaatgccaaatgattataccaattctttcttaatagttaacttcacaaatttgttataattccaactttttatcattacagaaaagtttgaaagacgtgattcttttcttactccaaggggacaggaaatatagaaagtcttggccaggcgtggtggctcacgcctgtaatcccagcactttgggaggctgaggcgggtggatcacctgaggtcaggagttcaagaccagcctggccaacattgcaaaactctgtttttactaaaaatacaaaaattatctgggtgtggtggaagacgcctataatcccagctactcaggaggctgaggcaggagaatcacttcaaccccggggggcagaggttgcaatgagccaagactgcgccactgcactccaacctaggcaacaaagttaaactccatctcaaaaaaaaaaaaagactgtatgaagagcacaaacagctgtttttcttacaagcacatcttttatatttgttaagaatgttttcctagtgtgccacggtaataatgaatttagcaaatcataaaaccccactgtccttagattcctcttcagtaaagttaagccattggacttgcataagtccacttcagtgctgtgattctgtaacttcaatgtgcaccagaagattgtggaataatgttggatagttgttcttttactcaatttctggatgtttcacttttaacactgttaatttcttatgagagaattttaagaaatataatatgcagatgtattctataaacttattatgcatatgcaaattagtattattaattacatcacctttcctaatataaaactttatagagagacttctgcaacattccttatccaaacgttttagtcaataatccatgtatattctaatttcaaagcaatagcctaaagtagaaaaaaaagataaaagaatcttagagtgcagataaaatttcagattatccagttaacattacttttcaatagcagaatcccttggaaatcttattgatcaaaatcatccaactgctgtttgaatatttccagtgatagcaaacttgttccctttgaaggcagcccatcctattattgtactattcgcattttaaaaactgtcttctttatatttttcactttttgattccggttttgacttctgaatctcttttatttctaagagttcttgtattagtctgttctgatgctgctaataaagacatatccgagactggataatttataaaggaaatacatttaatggattcacagtttcacgtggctggggaggcctcacaatcatggctgagggcaaaggagaagcaaaggcacgtcttacatggtggcaggtaagagcaccagtgcagggaaactcccctttataaaaccatcacatctcatgagacttactcaagaacaacatgggaaagaccctcccccatgattcaattacctccccccaggttcctcccatgacatgtgggaatcacgaaagctacaatttaagatgagattttggtggggacacagccaaaccatatcagctctcttctacaatttctcccttaattatttcatgattcctcgtatgacatagtttgcagatttctcgatgtactacttcatactcagtgtaccaatattcttatgtggtctcagtagggtgaagactggggggaggactaaatccttgatctaaaaattatacttgtattaacatggcttaaaaatgatactagctatttagcagccacttcactgtttatttgtctaacttttggtgaactaaagttccagatctcagtcataagaatgacagtcaactgaacatggtggtgcctgcctgcagcctcacctactcaggagactgaggtgggaggagggaggattgcgtgagcccaggggttggaatccagcctgggcaacagagcaagttcctgtcttaaaaaaaaaaaaaaattaaaaaactacagttaagccaggtgatacggtttggctgtgtcccaaatctcatattgaattgtagttcccataatccgcatgtgttgtgggaggtaattgaatcatgagggtggttcccccatgctatcctcatgatagtaagttctcatgagatctgatgcttttgtaaggggcttcgcccttcacttggctctgtcttctccttgctgccgccatgtgaagaaggacttgtttgcttcccattgtgccatgattgtaagtttcctgaggcctccccagccatactgaactgtgagtcaattaaacatctttattttataaattatgcagtctcaggtatgtccttattagcagcatgagaacaaacgaatacaccaggttttccccatcttgtatttaaggaaatgatttgttagcgtcagttaagacttgacatttagttctgctgcctctaagtttaatgttttctgaaccttgtttacttaaagaggtaaggttgaatcttgataatttgataatttacccttacctgagttctctctctcaaatacattttatctgtatgaaatgtctttatgaaaacattgtttaaaatgtggaatgattcaggataattacagagcaaatcagtagaagagagagccctttacagattgaccagcttccctcagttaacactgaattcctttactcaagttattattgcattgttcatagttattactccatttaactatattttgtcttccacattttcctcaatttcaagtctatcgaatatgctgctaaaaacatcattatacttaaagggaaaatttgactatatatctagaaactctgttaaaaaaggaaaaaaaaaaaagttaattcaccaagatttgtaatgcatgcttgctgcctcccagtgatcactggtttcttttacagagttttcttaatttcatatttaataaaatgttccaaagattgctaactttatgtattgaatgaaattctattagtttagctggtaactactgtccccagcagctgagaggctcaaacaaaagagcaccagtagggaatccagttgcatggatcttgtcctggaagatacatgacatgcctggaggtgctcaccccctccacacacgctaaggagcccaggcagagaggggaccagtgggccaaaggctttattgactccagggcattatccaaacagatttcctgcaggggagctttaattgcagggtttaaagcagcagccactagttccaggaggtcacgctgtgactgagaaggagtcactttaagtttgcaggcaaatgtctgaatggtccatttacaggaagtggcaggaaagtggggagcccagcctgctaggtggaagagatgcctctgagttttatctctggtcaccagctggagccattcgggtagggtataatgttggaaactgtgtcaagggtgactgagacctgcttctggtatgagaaagttaaccttttatgtgaaaatagatgctgaggcaacataaaattaaaagcacccactgtggtactggatcttttgattatggcttgcctacatcatggaacttgaactatttaatttggtacatttgtatttttttccattttagtagaagaaatttacactttgtcttttggaatcttcaagtcaccttgagagacattcgatttagaatccctagtcatggaattatgtctgtctgttcactatgcattaagaatctgtatgcctaaaactcagggcgtgggactgaggatacccagccttttctttctttatgatgatgaccacagttgcagtgttacaactttgtttaaggttcttgtctatacctcctccatgttccttcctctttttgtccagaagagaacaagcagggggtgaaaacttgccaaacaagtcatgtgagcagtgacgggatgacatggggttgttaagcctggggaaaagaaagtttgtgcaaacaaagtaactgtcttcgaacatttgagagacattgagttgaggtagaagagttagtttgagtctgcagattcagagaaatttgaattaaggccagtaactaagcaaattttaatgtcattataaagacatcttggtctaaactggtgaaacatggaatgacccatttcctgaccagcgtcactggagggtccaaggactactggggctatcccatggcagagtcgggttagatggagtccatgtggatcggcctgggtagtgttcacgattcctccaaccctgagatcacatgatttttatgctttatatatttatatcttgtttaaaagagatctaaggaaatgctatgaaaatcagtgcacatctattcacattcccctttttccttctaaaagttgaaactgcctgtaaggcaggaatttatcagatgctctgcttttgcccgaatgttactcccaacagatagtctaatgcttgaggttccctcatcatcatcttatcattctgctacccaatttaattatctgctttcggaaatcatccttcttatccaccatgctatgatcttctctcacagcaacttaagtattttttatttaaaccaaaatattctccattgtgttcccaccttctaggattattttctcctcaggttgtttacattgtttgtgtttgttcacaacagactgtactattcttcggcacttggttaattgtatttattttgatcaatacacaccctctgtcattgttctccatgcatgagtcacatcgctctgagttgaggtgtatactgcttattcctttgtgttaaaaaaatttctattattctcctttatgctaatatttaagttcattttgttttattgtcaacattttacatattactatatgtacttcaaaaactaagtattcgtagcaaaacctctgttatcattccgtctttgtgaaactcactgtcttctactacagctattctcctgtagaattttacctgtttcaccccaactctgacatgtgcctccaatttctctttgaaatatttttatatctcacatacacatttcctgatctttagaataatttctctatcttgagccagatgagtgaaatataactctgttatacaattgaaaaaacatttccaataacaaaaaatatgttgacactattctcttgaccagctttctcataccaagccataacctcaaggatgaagatatttccccaaggccttcagtttcagacccagagctttaaatcttcaagagacaatttggaacattttctataactaccatttattctctcttcaagtcaacctacttgaataggaatttgcaggttcagtggcatatcattttaagcaagaatgaacttcttggttacccatgttgaataaccaacccattgtttaggagacagtcaccagctgacccaccaaccttctttctctggagggtacacagggacctccctgggctgaggcctgtgcctcttctttgggtaaggagtgttgcacttttttttttttttttcagaagatccaaatttaactgctatggtcagtgccatttacagtttttgtggctttagtgaaatctagttttctcttatctttttcctcaatgatagcttcaattctctaatcttctgatgttccgtttgagtcaacatcaaccccactgaaatcttttcttccagttttcatcttggattattttttccatcttctctagggacacttcatgctttcttttttttttttttttttttgagacggagtctcgctctgtcgcccaggccggactgcggactgcagtggcgcaatctcggctcactgcaagctccgcttcccgggttcacgccattctcctgcctcagcctcccgagtagctgggactacaggcgcccgccaccgcgcccggctaattttttgtatttttagtagagacggggtttcaccttgttagccaggatggtctcgatctcctgacctcatgatccacccgcctcggcctcccaaagtgctgggattacaggcgtgagccaccgcgcccggccacttcatgctttctaataagcaagaggatacatagatattcctgaaattctttcatgttctttactagatagttgtatctcattcctccctcggaagagatggagaaaaacttgttagcagtctcagcagaaaattcttgagatggctcaggagtttccattgaatcatccttggtctttttcttttctttctttctttttaactgcgtaattctattctattgcctaatgtcttataggatttattttataaaatctttatgactttctgtcagttgtattcatgttttctatagcattagttacagagaacaaaatctattaagtatattcatgtatgatctgaccaatgctgcaaaatgagataatattttctatgctacctagtgttttctaatatgttgatttgaggtgaaatactatgtttgaatcttacagcaggctcattaactaatacaactacgtttgtatgtagctacctattgcataatgcatcttacaaatatttaccaaatagcaatatgcacgagatgctattctgaatggtgggatatacttatgagctaagcaggtgtcttcatctaaagaagctcacaatctgtggagagagagatagacctgtaatagcaatccattgtgctgagtgctatcacatgggcatatgcaaaaggccgttggggcctaaaggactatcttagcttggtggtagaagttcagagagtctttgcagaggatagtacttgtaagctaagtttttatgggtgggtaagatgtcacatgaatgagagaattctaaatgcaagaaatgtgcaaaggcacagaaacacagaagagcatgttgtacaacctggctatagtttagattttgtgtgtgtgctatgagagtgtgcgtgtgctgtgagtgtgtgtgtgggcgcacgcacgcatttgtaggaggtagggagaagagtgccggcataacatgaaatgatattggacctcaaatggtatgctaagatgtttgacaattttattctaagcagtgagtttttaaatttagacatgcaactataacatgaaagaggatttcgatattaggagtagtgtgaccactatggaaagaagagaaaatagtgagggcctaaaactaaggtagcagcaggggtgagaacagaattggctgggcaaagtggcacatacctgtaatgccagtgctgtgggaggctgaggcaggaagattatttgaatccaggggtttcaagccagcctgggcaacacagtgagatcttgtctctacaaaatataaagaaaattagccaggcatagtggcacacacctatagtatgagctactcagaaggctaaggcaggaggattgcttaagcccaggagttcaaggttagagtgagctatgattgtgccactgtactctagcctggatgaaaaagtgagaccctatctcttaaaaaaaacaaaaacagaaggattaagtgacatttagaaagtaggagagattggatttggagactgagtctctacatgtgtggcagagggaacagttagcctccagcacgtctggccagaatatttgggtagatagtgataatgataagtatgaattatgtaggaggagggatggagaagattattaattcgattggacagataaaaaatttgaagtgcttttaagacatatgttaaagatgggactgattagggttgaaacttaggaggcttagagatacagatttgaacatcatttgaatttgtgtaggttgtagtaaaagtcatgcacttggatgagatcctctaagaagaacatataaagttttaaaagaagaaaattcagggcccagaatcctagggaactccataatttaaggggataacagatttcatctctctaaaagacagtccaaagatagaataggaatcttgaagagagtagtgaagattggaaatggcaactgcaaaagaagctcgtgagctccatgcggaagggtcgctgagggcaaagtggtgctgagggcccatctaggtgttgatagcatacattttgcatcttactttattccatgaactgtgcttgatacatagcgctgtggttgtccttaccaatttaatgatgtttctgatgatcattgttcctatttggcaagattactttaaattctgagattatcttgcaaggaagaacttcatttgcacctaaattttggtggtctttatcataatgaggaacatctctctgccatcatctggatccacgatgaaaatatcaaagtgcccctgagacaaggatgaaacgttgccgaaaactgctgtccctcttccaaatgtccgtacagatgtgaatgaaaaatagcagcatacaagcatctgaactggcttggtcagcccagcctgagtgagcaggccaaaatctgtctgcaccagatgccagccaggtccaagagaaaccccaaacgatctgataataaagaggaaaccctgatatgtctgtggccaaaaataattagcaatggaaatggaagggcacttaaaggaggaggaaataaaggaggagaagggatttttcaaaaagaatctctgggcagacactcaaggagagttaaacaccccaaccgcataggcctcaagggagcaggtagaggtgacattgtctgctgtatgtccaccgaaaagagactgcaggagttctggacagagtgcacattcacccgagtgataaggcagaggcttaggatgactgagtatgttgagtcctacatgtcttccccaactccatcctcatattttaggagttatctgggtagatggaataacctctatcttagtacaaaagtaagtggactacatcccaggggccaaatccagccctctgcctgtttttataagtaaatttttttggcatacagccacaccaattaatttatgtgttgtcatggctgctttcacactaccacagctgaactgagtagttgcaacggaggatgtatgccctgcaaagcctaaaatatttacattctagccctttacagaaagcgtttttttgaccccttagtatgaagacactttagcttgaaaaacagctgtgcctaaattcatcttatatgattgaaccactttatagcataaatacacagacacccacacacacatatacatgcacacacatgcacacacacacacacacacagagaagaaactgagaatttaaatggctaaaaaatgcaatctgcattctgactctgaattatattttttaaatgttgcatagactttgtttggattaccctcttttattcccccccaggctctgtcttaatcttcctaagtgaaatctgtcctttgcttcatgttgtcttgtaaccatatttcaatagcacttaatcagtgataaaactgctttgatttattcccagctgtggatattattgttgaaatctgcgtaagtgttccgacgtgttatgattggagcaatagcatttaagagtccagaggcaagtcagaaaattaacaactgagttttctgatgcctaaattaactgcacagacagcgctgagtacaatgagaaagttctgtagaaacttactcggcagtatgtaaagtgttgaaatggctcacccattaaaagtattacatggtgaggacaagttctcattggatatacttcttacaggcagtgccacaatttcatgtaaaggacagctggctgctcttctgggacacttttctttatgcaacatatacattgttgttgctaaagcatctaacgtgatgtttctcggttctacagcaaaactgagccgcagtaggtgccgtgtggtaggttctgctgatgcatctgcagtcatcggaaaagaaaaaagccatatgattataaaagcaatctgtattcattgcagaagcgtagactacagaaacacaaagaaaagcaaagtgactcataatccataatcgtagcacctacaaataacagctctttggtgtctagtctcccaaactatttttttaattcctgtgttattcatgaaatgagatagatcctgaaaaaaacatctgagtctagatgatatgtggaataatatgttctcaatttttcagttaaatttctggcactttatttcttcatggaatctttccttaaatactgttgttatttcgctgccagattgcttgtagtttgagttgtactgtatgttagagttggccatgatattttattgtttgctgtttttctaaatctgaatctgtgtgaattggagagagaagttttcaatacatattttaattgctgttggttttactcgactctcttcatctattgtttacaaatatccccaaatacaactagatgttattggtaattattgattgtcatggttgccaggcattactggacctagagttcttttttactacataaaaactcaaaatattattttttcatgagacaaatatgctttaatgtctataggagctctgtaactgtcataagtctttttacaatttgaaataatggtattagatcgtttcctaacaaacgctgaaaatggctacaaccttaagttgtgtagtcttactctattattgtggatcaaattgtttatcgttccagctagacttggagatccttgagatccaagatattttatctctgtgttttcagtaccttttctagtctctggcacataaaaaatacatgcctaataaatatttgtagaatacaaaattacttgccccaaatcatcaattgatacagctgtgcctccttatttgctctgcctgcccccatatttccccttatgttaaacaatacggtacagtggttaaaaagtaggttcttgagttcaaagtctctaggcacttttagtaaagtttaaatctgagccttctccacttctgagtcatgtgaccttggcaaagcctgtggacctcagtcctgctatttgtagaatgttgacagtaatagaactgacagcacagaattattgcaggtgaagtgaaataataccctgaagtgcgttgcccattcttggtgtccagaaactgttactatttattttcctctctctcgatcattttcatacattgaaataagctatgatagacactttataagttttaaaatgcttttaacatgtataacaaatattaaaaatgtatgctatgacaatacggttcattgttatggtttctttaggttcatttcactttcatggatttacaagcactgtaaatcttgggcctgttatctttgcacattttcttgtgcccattttcatctaaggagaaattaaggagtagagaaaggatgtaagtctccttaaggctactcagaattataaacagtaagaaatagaagttctatagcaagattcttaaactgttgaataaaatcttcctttcctataaaaagactgttctgagtatccatacaagtatcatttataaccacaggcagggtatgtatgggctttgatttcaggtgctgtgttttgctgaagtctgctaacagcctctacatcaaattcataatgatattaaaatctatggttcttagaaaaagaatggttgagaatgtgttacaaaagcaatttgtctcatcatgttaatgttgatgccctcttatcccagaacctggctgaagctggagtcaaaatctatattggtttaattttaagtggccttgtgaacaagtgcattcaggcaatgaaggaactgaaagctacttagaccacccaggctcctggttgtggactctcggatggggctgggcattgttaaaggaggttgaacctacatgcttaaagtttctgtgaaggaggagttgaatttttaggacaatgtcagttgcttttattgtaatcatggtgacaaactgaatttattaatgagcataataggattagatatttttaaaagcctctaattttctagtttaatttgaaaggagctccttaaaaagtagacaaatgctttcctgcaatcttttagaagaaagagtacatagagactgataaagacaagtcatggccgggcgtgttggctcatgcctgtaatcccagcactttgtgaggctgaggcaggcggatcatgaggtcaggagatcaagaccatcctggctaacacggtgaaaccccgtctctactaaaaaatacaaaaaaaattagccaggcatgatggcgggtgcctgtagtcccaactactctggaggctgaggcagaagaatggcgtgaattcgggaggtggagtttgcagtgagcccagatcgtgccactgcactccagcctgggcgacagagttagactctgtctcaaaaaaaaaaaaaaaaaaaaaaaaaggcaagtcataatgtacagcctgatgatgtgtgtgaccaaaggtggcaagtagcattgatcattaaataaaaattaagtatatgtattcctattcaagtgtaagctccctctcttcttgtaattatgcttgggtaagcatggtttcttattgtttaaaaaatgaaaggaaattaggtatccgagaatggctttttcccttgctgggagatagcaactaaatgacatgatcgtaggtgacagaggctcctgattccctcacagatgccagtggaccaggttcattttgaaatgagccaggcaggctccaagctcaagctcacccttgttcaggtgtgccggcctcaccaagcccccgctgctcagtgaggtgaagagtgcttgatctctcccatgttcatctcagccaggggtctattgttaagacctgcctgaaagctggcaaaatgacattccctggtgtgattgagttttaatgtaagattacaaccatagatcaaagtgaggaggacatttgggcaggggctttcaagaattttagagccagagcataaagaagataattatactgtatgatttagggttgtttctgcatgtgtcactcacaagcaaggcttgtcctctagtttataaagggctttgtgggttttttgtccttcccaatatttcctattatttagtatctagaagaccttttaagggctatgattaaagaaaccagaactgttctataaatggcctttcctgataatgatgatcagtcttttagacagacagcgtattctggatttgttatccacaaattcagcaacataaaaaagaaaaatggggccagcattctggtagcttgaagtcctttggttctgatttcaccagttcggattttaagataattcagtcccagctgggcttaagtttacttttgcattgttgacctattttttaagtgttagaataaaatcatcctccttacctggagacccacagagaaattcctcctcaattgtagagctttggaacaatttaatcctcctaatggtctgatatgcttcctttgtttgtttgttttgttagtagagatggggattcaccacgttagccaggccggtctcaaactcctgacctcaagtgatctgcctgcctctacctcccaaagtgctgggaacacaggcgtgagccaccatgaccagccctttttgtttccttttttaaattaagcaacaacgaaggttttccctttttgccctggctgccagggactaaatttcatgctcagttatgatagcttcctttagcctagatttctggaccctgtaccctttttcatttgttattgcctggctttttacccacataacaacagatggattgttctatgttttctatatttacagtgccagtaagtgtatattaatgccaagtcagctttatacaatttgtttttaaactttaaacattttatcacagaaggaatgcatgattattttaaaagatagaaaatgtggaaaagcaaaagtgaaagttaaaaattacccttaattttaccaatcaggaagtaatttgcttttaaacattatggtttcttaactttctgtggcccaaccataaaatgaggataataaacagactccacctttaaggccccacccactaagattgctgtgagtataaaacatgttactccatgagatgttctcagaacaacaccagggatgaaatgagtgtttgatgagtgttggtggttattgttgttattgttggatatcttatcccagaccttttttcctaagcatatatgacagatcatttttgtaagtaagtataggcatgcattcagtaaaatcatggtatttgagagctgcaaagggtcttagggtctttctaatctagtttcaccacaggggattcgggaaataaaccggggagttggggatttcttttctaccgctcaactattactgattctgccttaggacctactgcatcagaaactccaagaataggtatgtgtatctggggagaaaaatgaggtgatactgatgggagtacctgttgactggacccagcgtatagccagattgcctttaacaggtgaggagaggcagcgtgcccccggctgagtgagtggcctcaggatcacacagtgtttacatggagctggagcaagacctgagtctctgaatggcacccggcgctggcttccatcaggcaaggggccaccaggcaagacaaaagagataaacattttgtgtgcattttggcagcatgataatctgttatatccagacagttgctgcaaatagtattccgtgttaagatgtaccataatatttgctggaagttaattcaggtgactaaatctgcaactgttgaaagtaaaaacaaaacaaacaaagctttggtttacattttaaagcattgatgtttcactaattcattttgaccttctctcatcagtctgactcagtgaaattttgttgtatttcagctcctaagtttaagatggttttggggggtgggtagaagccaaagtttgttatgaatttaaaactttgctatggtgccttctagtgaaattcttcgggctttcacttctcaaggtggtcttccttgctttgcagagcactcacatgtgagaacagagagtggaacggggcagtttcatatcattcctagaagttcagttcccttgtaaaactataagaaaaccatgtgctgtatgttgacccatgtttgagaaactaccaagaaaaaaccaacttcttgaaggctgcatgagctgagcttgtgttgggatgatttgtaatggttctgaatattacagatgcagctataatcttgtatgacactgccctcaccattgcacatgactgattctgtaaggatctacaagtaggtgtttaggtgtttcaccgcatctgcctgacataaactaatgatgtagactgctaaacgtggtgacatgattaaacaggatgttaacgagtggctcctctaagagtcttgctcatttcttttaacagcctttgttatgcatgtacaaaagttaaagagacagaaatggctgtttcctgcaaagcatctgttaacagcaatgggaattcaagaagaaagcatttaaactatctagtaagacacacagggccatcttcttgtcctgggggttgtccaaaaccatgtctttgtgggaaggaatatggcagtttttctgcaggcagtaatcatttgtactattacttagttgtcatgtattgatgatcccatttcaatcaaacatatctcattcagagagctttggatgggaggaatttttggaagggtttaggaaggttaaatctgtgagatatggcttccatctggaatgcattagctacgaagatttattagtcagagtgcctgtgcataatgttccatggaaagggggccctgcatctaatttccagtgtgatgtctatatgaggagtgatctttgaaatatcataggtgacaatcaagtttgttataaaaatagtaaatgcccaggattttcatggcggctattttaaatccctcatgagggctgctaagcaggtagttgatttgttgacaaatgataaaactgtaggaatagcaacatgcatgaaattttaaaatggggcagctcttttaagcagaaaaagactattaggaaaattatgagcatttagtgttttcatttaccctttctttgggcacgataacattagaaaataagaagaccagtcctcaactctgtgaagaagtacatcccccttctgattaaaatagtttttaagagctagtgttgttgatcaataagtgaatcagggaaagctttataacgactcatatattagacagcctgagaccgcactgttttcagctgtaatgtgattggtataaattagaaattatagcggtgctagaatcccaactctactgatctctgtgtggaagggaggcagagctggcatgcagctcaggcttacctgtgggactgttcttctaaaagataacaaacagaaaggcagaaatgggggtaaaggttgagtgtgggctgcagaaatcaggatttaaaaaccagaaggctcctcagcttccttcgtaaaaggcaactcaagcaggggaaggacttcctccgcctcacctgccttgttctcagtcgccaacattaaggtaacataatgaggtccaatgcagtcccacaaaagcgttttataccatcaggaggcaatacggttcaagatgccttccctggctgtgtcatatcttcctgaaactgaagggcaaaggattaatgccaggtgaagggcgagtcgccgtccaaatatttatctgtgaatttaggtcacaccacaatgcccagttgtgtcattctctctcagcataggaaaaagtgttctgtatcctggatacaagttcagtactaaatggttctccaaggattacaagagaaatgctggagctcagcaattttcttttaccctcctgttgggcttctgtgccattgggcagttttgtgccagacaacagaattgagagtgaaatagtactaaccacaaaacacatgttagagaatgaaaagagattttactgcaagacctcaaagagcaaggtttgggtttttcaccttctaagtcaacatttacagggttctaaacttgaaatgtgtatttctcttctgcatcctctgtgcatgctgagaagggcatagcaggagcaatgcctcccactactgaggaggacacattcccagaaactcacttacagtaggatgcatttgaggaccttaattgcttctattttcccatcagattttagcaaggaatttcattccttcttcttttaaggcaaagtgataagaggtccccacaaacccatgtcccagacatgcttccccactccaaatgactgggtccttccaaatccctcgctgtagccttgcccttagcgtgtgtaagtctggctcgctctctgggcttgccttgacaagaattatgggatggtgccagatttcctcatcagccgatgtctccttttactaaggtggggcagcaccctggccaaccccctggacaccccttgtttgcaggaacctgtgtttatcagcgtctcactgtatcctgaagtctttgtatgtaatttaatataaactaaataagacagtggaaaccgcgacaggttcccaaaggctcactggttgatgtgtttttacatctggcatatgactgacaatactttcaaggacatagctgttgtggaagttaagtaactaatccaagaagattgaatattgtagcaagaccaccctggcctgcccggttgtccaaattacttcagtttgctcaagaaaagagcatttgctcaagaaaagttcctcttttaaattcaaagtattcttttgttttttaaaacttcagtggcttagaattaaattaattgcctaatgtagacttgaatacatagaaatatttagaaagaaattccaaaaacatttaaggaaaaataatcagtttttctttcatgtcacaatctaggctgtttttggtattttgaatcactttaaattttctctgttttgatagtgattagtaaattggcacagatttattttttggatatatgcctgatgttcagaacttcttttaagtcacatggggcgaaaaaagaaataccatgaagttctgtgagcaaagttttatgaataaaggttaattttactaaatccagcaaaaattattttcattagagttaaattcttgaagaaggaaacataacattagcatgttaattgtcatatctgaaacagaaatttaacatctttgaaatgagatttcactttaaaaagcagttgcagttgtgctgtctatcgttcttcagtgcaaaatttaaactgtatgctttgtgttatatgaaaaagtcttctactagtcattgtggccaattcaataataatcagtaattaagtaaccaaaagaaaaaggatactaggcagtttgattaaatttgattaaattattacatacgagagttttgttacaggaaaggggtcccgatccagaccccaagagagggttcttggatctcgcacaagaaataattcagggcaagtccatagagtaaagtgaaagcatgtttatgaagaaagtaaaggaataaaagaagggctactccatagagcagccccaaaggctgctggttgcccatttttatggttgtttcttgatgatatgctaaacaaggggtggattattcatgccttccctttttagaccatatagggtaacttcctgacgttgccatggcatttgtaacctgtcatgacactgatgggagtgtagcagtgaggacgaccagaggtcactcttgttgccattttggttttggtgggttttggccggcttcttcactgacctgtatcttgtgccgacctcccatctcatcctgtgactttgaacgcatgaccatctgggaatgcagctcagtagatctcagccttattttacccagctactattcgagatggaattgctctggttcacatgcctctgacactttcatatgtaacaatgggataagaaaactataaaatattatacaaatgtaaggtgttgttattgattcacttaaccagtgagaaagtctgcacatttagttgattgagtacataatcctggaaatctgcagtagaaatcatggacagtattactacatgagcacttaaaatcagtgtcatctcaaagtcatttggtcaggcaatctgaggtgagtcagtttatctctctgatttatctgtagaagaggaatattaattttatctcatggtgttgctagtaagatcaaaggagtgttggtaaaaatgatatacaaaagttgattcttttatatcttgtaaactctacctgcctctcttatagcagcatatcgtattttgaaggcaaacattgtacaaatctcccttaaatatcactgattgcataatctgctccctggctgagtcagaatccttattttttcattgggtgcccaagaaccctctttcctttacatataattatctgttataataatccgttctcttctctttctgtcatccttgctagactataggctcttttaacagtagagattatttctgcctagtgcccagcatggtgcttggcacacagtagttattcaataattatatgctgaatgagtgaatgaatgcatagaaaattacacagaaggtgactgctagatccttcttgcagagattttgtagtagcatcaaagatgtggccttccacaaaaggactacaaggactattacaagagtactcgtacacatacagctctcttatgggcatactgttttttattttcttgtcagtaacattggcaatgaaaaaaagattgttttataattgccctcaggactccaagtctaaacagtcccttcttactattatgttggagtacaacctggagatctctggattttaaccctcacttccctctgggcagggtgccttgaatattgcacagccgtgaggcaatccttagttcactgtttgaagtaggctggctaccaacattaaaagaagtactataactccaagtttctgtctctgttttattttgcactatattttctaaatatggtaactaggcaactccatgttatacaagtaaatgcttttgcacttgtggaatgcagttatgtccctgaagctgtgactcttcccaaaaatatatgtatcaaccctttctgaattctaaactttcctacaacgtcctaaatctttataagctcatgatgattttattgaataatcacgtatattttcggcgtaccctactgcctcctaccctcctactttccaccctcttttgcaaattgattcttctactttagcaattccttttactgttgttgtggttgtcgtcgttttgtttttttacctactggatttgctattcagatacttaaagaatatttaaaaatcagcaaggaaagcacacaaaccaactaacaaaactagatttacagaaaaaccagagagtgggtccaggaagttgagacactcaaaatcagtctggtgttgtgatgccatgggagaggaggagggtaacattattggcctacaacttttttaaaaacaatcttctgtgagttttgttaattacatcattccctgtttcttgacaacaaggacatttttgaactgctcaccatatcaacgattctacaagggtaacttattagtattattgggaataaaactggtgcggacgatactaataattaagtacgttcaaagcctgactcctgccatttatttatttacttagggcctgcgaggctttatttaaaataacaatttttgtttaatagtagaatcatggaataatctcaagttgtcttatgatcttttcccttgcctttaggaattcagtgctgagctagccaaaagacaggaatgtctgttttattttgaatgcttttcagggtctgggagattcaactgagaaggctattttgatgttgcataaaatgattcctgtcaaaatcatttctgtaactgttctgcctatttcaataagatagttttatcctggtgtttttaaaaaatcttttcattcatggcattctacaggcttgttattgtcagataataatagctaacacctagatagacagtatgggtcaaacatcttaaatatgttcacgaaaggtttttataaaagatgttatgagttccgacgggaaaatcacaccctgatgggcatgagggaagatttcatgaaggaggtgacatttggttaggatttgtattccctacgtgactgttagccttaagcagaaccactgccatgtttgcggtaactgacaaaagcaggttccagtttgaaatctgaccttgcacttagtatccaatgataaggttatggatataggatagataatacttcttaagcaaccccgaagaggaagcatagcttagtgcaggcttaaactagagcccctgattcaaatccctgctctaccatttcctctgggggcagatgaattggcctgcctgacactcagtttcatcacttgtgaaatgggaatggtaatagtttcaaattcatgaggtaatagagacaatagagatttcagtagaagtcaagggttgtgaatgtgtccttatattttctaagggaaaggctgcttgtgaggaagttcttcctgcctttcagccacagataatggcaactcctacttggtttattatttatctctgtactctccatgactgagcattagatgaagtggaaaccatcattacaggaagttagtccacaagaggatgtgttgttggtaaagtgtgagggactgcagaaacctgggctctcattcctcgcctgtttccagctagcttatctgggcaacattaggcaagtcgaacaacctttctggacgcagttccttccctatagcctgaaggcacgagaccagctaatccccccagcactatgatagtcattattgctgctggcaaacctctggttctcgtctccttctgggcacaaggataattgaactctctgcccctttgaggtcgggtgggaccatgtaactagttctggccaatgagctgtgagtggaaatgacatgtttcctacaagctgacatgtttaatgacaagaccctctgaagttctcattccttcttcatgacatagacggcgactgttctgtgtcctgggccctggaggaagggtaacggggagcagagatcccagtgacccatgttggatttgagtaggtgtgagaaataagctaccattttttaaaccactcataatgtgggatcatttgttactccagcataacacacatatgccaaattgtcactggcaccttccagcctaaggcacccgggaagacttcaggaggagctgatgtttgaagtcctaatggccatgagtatatggtctggattcaaaacctagctctacacaccaccagcagtgtgaccttatgctagttgcttagcctctgaattttcattcccttgtatgaaaatggagatattaccactggttatcttattgagctgataaaagggtgaggataaaatgagatcttacatgtaatacattttagaaaacaactggcagacagaaaggtaagtaggtaataaatggtcattcttgtttttctggttttaacattctgtgagttaacgatttccttatctttttatatttcttattgagctcactgcgaggactgaggaagtttataagaaatatggcaataggtaatggcttaggaagaaagtggaaggagtagtaccttagcccctgtaagccagctgcttctaatgggaatcagtttctattagtgtatgagcattacatcttggccggcccatttccaaaaataagagccaaagccactgaacaaatctgtagtaatcctttctaagtagccatcatccaaccagtgatattttcctacaaaaacttctttgggaaaagagattatatatttgtatcacctcaaatcttgcaaatttgtgtcacattttgtctttaaagctttcaagtaaacattaaattgattatataataaagccaatagctcatttggaatatttacaggaaaacccccatagaatgggcataatgagaaaaataatgacgcagtaattataattctcaaggctaataattttaataataatttatacttaaacagctctacacataaggagatttcaaaggtttataaatattaagtaaaagctccgtatgctctgccattcctaaaacaatgccttgaacctaacatttctgaaacattcatgcatcattggtattattttacaaatggataaactgaggcaaagaaaatatgcctggagtcaggaatgtgtagcaataaattcttgtcttctgtacctatacccaaaatccaccaaattaagacatcacagtggaataattgatatttcagtctctcaaggagttaaattgtgttgcactaactgccgccacagtgatgtgaggtgacccatggatttcatttagagtaatgggttctgtatgaaaacagttgcagtggggatgggaggtttttgtggcttgtggtcagtcctcagttgaggtatgagggaggtttcaggttggattcctggcatggcaaatccaaaatatgtgctccagccagaaggttactgctgagtgtgcccgcctcctcaagagtggaatcagagcccatcaaaagctgccctttttttgttccactgtgctcattcacacatgatatcccaaaacagttaagtaaaatgagggacattatatctgtcacacatgagaaaactgcagttatggatttgcttaatgcattcattgctttttggactctggagtcccctgggcagtgccacaaatctacatgttggcccctagttccatattctgtgtgggactctctagtgaagctagcatgtgtatgaaaggttcattattattgttgttaattttttttattttcatggttcaaatgaatcggcgttaactcatggtaacagtaagggctgcactggccgagtacattacagtaatctattgttgaaatagctccctcctggctatacactgagcactgaggtcctgccttctgaattaataccaaagcatcggtgacatagctgacccatagcagagagcctgaagccactgcttctctatgaagttttttgagagatcgacccctcctaatttttccaaatgcggtccctgaccctctgattcctgggatcttgaataatgttgaaggtgaagctagtagtcatttattccaaaaacatttactgtctgtggctgcagctgtgacacaagttgtacagagcatgctgtcctttttcatcggccgtgcatgaggattgttctttgatttatggtcataggctctgtttggcgaggagctgggagctgtttgtaccttcctgtatgatgccaagtgcaaagccctttgttcagagaactgcctggtcctgatggaaaggcttgggctcctctggcagcttctgcagttgcctggacccccacacctgtgacccaaggggcctggcacacagtaagcactcagttaatgttagctgttgttatcgtcatcaggttcatcatcattatcatcatgccatgatgattatctttccattcactatagaaacagtaaatagggatcttgctttgatgtgtttaatgtgtgttgcccttagtcactcactattaaattcccaaaggtttttttttacttgagtgatcaataaccaaacaaattatgtatttgtagtatccatttacaattttattaatctgtggtggcaaggactatctttgttttttccaaggcaaagttttcctactttgcacgcaatagatgctcaatgaatattatgaaatgaataaataagtaaatgaatcctctaattctgtcagccccatacattaaagtattttaaacacgtaattttattaagaagttatatggtcaagcttaagacgttaaatgcctactatgcattctcagagtaaaaaagtttaaaatgtaactactgtctttaagcagttcacagtaagatcagtcacatgcatacaggtaacaaaaaaacaagattatagaatatatcgattcaagcatgatgtttagtgttcttggtgttattactagctttggttgagcacttactacataccaggcactttttacagcactcttgtttaattctcacgtaaaaatctatttttattagccctgttttataagtgcagaaactgaagcctagaaaagctacatgtgaccaaaggcatatagtttacaaatggtggtgctataggatataatatgcttaacttctatatactaaataaaaatggccattacgctcttttatttcctttcgcaaaacatgcctttgatattcaatttatttatattttcccttgctttaattcagtataatatatggcatatattaattttatcattattcggttttatttgttcttagtttagccacctcaaatcatttgtggaatcacacgagatccaacagatatataatagataataaaatgctaaattgtgtagtatctacaataagcaaattaacagttttgagaaaggagcctgggtagttgagcatcgagcttctctggaagaatggatgaaatcaaaacacatagcagatggggaggcaggctggagcgtgagcaaaaccgcagtagcacaatgagcatgcgcttgagcttcgggagcatgctggggagtgcaaggagactcactgcccaggagtattacactgtgtgggagagaggatggagctgtttagagaagcaagagagggaccatggcccaacctgagggtgtgaaacctggtaaaggcagggctagaaaccaggttcctttagcagcaaaaccagggtcattctgctggagacccctgtctttcctatcctagcaagagcctcaaattctagagtttagaatagaaaaacacagatgctagaaaaagcagatgatgattagcaagatttgttttaacctcttaacaaatattcacataatggaagtagccatcaccagtttggttatcaagtaaatactatcagcattagatcaccgttgttcatctagcaattgtatgccttttgagaagacgtgggaagactgaagagtttgtttactccttgtattagtcagttctcacattgctgtaaagaaatacctgagaccgagtaatttataaagagaataggtttaattggctcacagtgctacaggccatacagaaagcatagtagcttctgctcctggggaggcctcaggaaatttacaatcgtggtggaaggcaaagagggagagaggcgtctcacatgatgggagcaggaggaagagagggaggtggaggaggtgccacacacttttaaacaaccagatcttccaagaactcactcactatacactaccaagggagatgctgctaaaccattcatgagaactccaccccatgatccagtcacctcctacaggccccacctccgacactggggattacaatcagacatgagatttggtgaggacacagatccaaaccatatcactccttgaaggaggtaataaaagaaaggttaggctaaaagtttcatgtctaatatatttattaagggaagttcttattcattggttgtgttttactaaatctgtctgtgagtgggtataatgttagtgttcataaagttgttacttggttggaattaccccctcaaaaccagaaccgcgtgagtgactgtgactttgcgctgctcactggggatgtgctcaagcccgcctgtgtgcatgccctcagcagccagatttcctaaagtgaattgaaggaagaaaaggcttagggattttgatgcccagattctgtatttggactcaacacatgtgccaggtcacataaggcttttactgtttatgctttatgtgcagaagatcttgctataatagtgtgtaagctgataaaagagctttctctctctctttgggggaagtagatggaaaacaatctagttgtaattaaagttgaggtcttgctgatagtcatttacaggttaaactactatacactggaggaggaaatcatgtgattcattttttaacttgagctattgtagagctcactttagacatgaagttctaaaagtcagcttgaaacagctgaaagaaaagagaaacatgaacgcatctgtttccagaatgtagctgctttgtatttgggagagctaactacctggaaatgtgactggaattgtccctcccccggctattttggcctcgtctaggcaaagcggcagtgccctttgtatgctgcagcggtgacttagctaacctaagcaatgtggagcatgtgcggcagggctcggaggcctcagaatcaataaggaccctttagatttaaaactaatgattttctgtgttcagcaaaagtcaaaatctctcaaagttgccattgttgtctctgagtttttccccagagaacaagagatggtgtgataaatcatcatgcttgcaacacgcacgtcagaagagacttgaactagaccagagatggatagcgcgagccccaaacatcttaattatttcagtcttgaattgagcaaaacccttaaactagaactgtgggaacagtgatcctaacagcagtagacacaccatctaatagggtcatcatgccccccaagagtacaagtgtgacccatccaggcatgcaaatgcaatcgtttcctcccagcagaattgtaagcagttgaatggtgacgtcaaatgcttttgaatgtatctataaactgctgttgaatgtacataaaatttcaccagactctctgatttaaagccctagggaaggccaccaggctcgtatggaaattagctaagcataatttattcatggaaggcagaaaagctgaattaataaatacatgagtatgtaaacttataactgcataacgatctgtagaaaatatgaaggccaagctccatgtgttaacagaaacccttaaggtgtggccacttggtcctttcttgcaaaaagttctgtcttctgttttaaaagccaatgtggaaataactaataagaaatacatttattctttggagggtctctttttttcctctaaaaatgtggacctgccttgtggatgcttctctataagaatcaatctcagagaattattttttaaatattaatgaaggcactaattccagagattcagaaaactgcttctcagcaggtttaactcatactctttctggatggacccaattctgagagcattttcacaaagtattgttaaaagtacaaggtcttgccttattacaagagtggtcatcgttcattttttcccttattctccccatgatattaaatctgtatcaacattatcagcctcatcaagcattgatttagcagtacactttttatacagcaggaattggagtaaaatatatactgtcacacaattctttaaagggagtcttgccttgtattgaatgcattctagtaaaacttcattcttgttaaattctgagctacagttaagacccggttggaatccaaaagaccgaatctacaggggtgttacctaggatttgataatcaagcaacaaaactcggtatctcctacagttcttgtaatttggtcagaacattccaagagaagcatagtacagtatttccatccatctttattactgatgttatcctttagtaattaaagacattttctgaaattctgttttgggaagcatcagtccctttcaaactttgcccttagtcaagggatgaggacaaaacaaatacatgtttaaacctttaaaaaatagtcttgtttgagaattataatccatacaggataaaggtgattcagcaaatgccttcctatccacagccatgatcaataaagaggaagttttctttaaaaaaaaaaaaaaagagtgtgtgtgtatgtatatgttctatgtgctagtcatagagtggtttataaatattcactcattaaactcttgtggcaactctatgaggcaggtataattatatccattttagaggtaagaaagtgagacacaaaaaggtatataacttacttaggacctcacaactagtatgtcaatattagaaatcagccttaatgttgtgaatatatatttacagcaaataccaagacctcatggcttcctgacctcagtccttaaagtgtgttaatgggaactagttattctaggataaggaaaaaatgttcttctttatagcatggatcccgccagttacctaggctgagaatttttaagacaggctgttgataaccctcggtgcagtattttcattcctgttctgaacactctcttcttaatttgactgtttggtaagcaggccacattctggtaaacagaacaatggaaatgcacgtgtgaaagtaggaagatgtatgttatgattatctgttgctgcattaaaaaaaattacctttaaacttatagggctgaattaatgacaccgtttatttgacttttaaatctgcagtttgggtagtgtttggcctgggtaggttttctcagcttcacttggcatcagggggccagctcaagggcttgggtttggaatagtctgcagccacactccaacatatttctgctgattgaccctgcctatcagctgagatctcatctaggactttgactggaacacctacctgtggtctctccacgtgactatttggcctcctcacagcatggtggctaacttccaagagtcaaggtcctaagacaaagaaagccaggtgcagtaacctacctcagaagtcatataatgtcacttacaacatattttattggaaatggctgacacaaagttgtgcccagtttcaaggaaagggaacatagatcctactgcttgatgaaggactgtcaacatcactttgtaagaagagcatgggggatgcataaattggttccgccagttttggaaaacacaatcttccagagttcatattttcttaagcatttaggaccatcagtataaagaagtgtcttgcatgaacaaatccctttactataataatagggtccgtattgaaccataggcttaactgaaataactgtccaaagaatcaagttttgctggaaaccaaatctcacatcagatagaaataaccaaggaataggggaggaaaccttctaaagttaattctagccttgttcctacttcataggaaaattctttagaggtgggaattccctaaacatatgtaaggtggttcatttaggctgatcacatctttaacagttgccaaaggatcttataccagatgttaacattctattttctatcaaagagccatgttggattttttcattatttaatatgagaacaatagaagtgaacttttatgaagttccttccctatggaatccaactgaagttaactagacacactttaagaaagatggtgaccatttcagagatattctatttactgagcatccggcctgagaacaaaatggacctcaaccttgagaaactcacaagctgatgcgggatttgtagagcatatttaaaaaaaaaaaaaaagaatgttctctttatgaagtggataccaacaatctacaatctacctcatggctttgagcagtttctccctttgtgtgatagaattgcacgtagccagttatacgctgtcctccagtctctttcacgagagctctgcgcatattaggtagctcttctgagttaataacaaaactgatgcttgtacagtgctctgtgcattccaaaatgctttcccatccagtatcacatctgatgctcatagaaagtctgtcgtctggatagaatcattgttatctccatttttcaaattgggacctgagaggcaagtcacgctagctggagaagctggggcagtaatctcatgaccttactccttattcaccgctttttgccaaccatatgattttcagttacaccaaactttctgaccaatagattgaaagcaaggtttcccttatcttaggccatggcaggcagaaagcacatgactgtgcttatgctgaggatgtcactgatggatcagtgtggtacccaggagtcagcattggagtgggagtcgggagacagcgatttttgccctggctcttttacccattattgcccccggatgtggaacatgaaggagatggactagataagtttctaagattactttcaagtctaaatgtttatgataccatattatataaatgcaaaaccagagtagttgatatcaccgtccttaaaagaaatcaacgaggtaggtagaaattaagttgtaaaatgattatttttatctaataaagggggaaattaccagtagaaagtttgaataaggttaaaactggagtccccaacccccggtactggtccgtgacccattaggaactgggctgcacaacaggaggtgagcagcaggcaagcggcgagcgagagaagcttcatctgtatttacagccgctccctatcactcgcattactgcctgagctccagctcctgtcagatcagtggcattggattctcacagaagcataaactctattgtgaactacacatgtgagggatctaggttgcacactccttattagaatctaatggctgatgatctgtcactgtctccctctctgccctcatggagcttgtattctagctggaggagagaacaagcaagtaaactatatgtatgtcaaatgattaaaaggggaataggaagtgctggaggtgactgcagttacaaattgttgatccaggaaggtctcactgtgaaagtgacattttaatagagacctgaggaagggagggggctgaggttatgtagataactgggagaagagctgtccaggcaatgcagtgtggctggaggggcatgtgccagaggaagagattaggttggagaggtaagagggttttgcaggatgtagggggccttgaagactttttgtaaggagttttgtctttattttgagtaatttggggaaaccatgtgggatgggtttgagctaaggagtgacaagatttgacttaggctttacaacaatacctttaatgtgaattatatctcaataaagctgtttttaaaaaacaaacaaaaagaatcacctctaactgtcatttttctaacagactgttgagaataggctggaagttggaagactaggaaggtattacaatcttctaggctagagacagtagttacttgaatcagctgatagcagtggaggttagtgagaaatgatcacattctgtataaatgaatgtcaagcccataggactggcaaggatgactccagtgtttttgtcctcagtggctggatgaagttgccttttattcagagaaacctgtgtgaaagcaggttttgctatgcgtgtatatggggtggggtggagggtggattagaagtcaaaaaatgtgtgcaaagcagaaaaaaaaagacatttattattgatatgattatattattttactttccaaaaggatttgaaaaggcttataagaaaacctagagatagaatgcggatggaaaccatttaaaaagcaaaaacagccgaaacccaatcaaacagtagtggatctaaacggaaatttcctgcggggggaactgtaagcatgtttgcttgagctttgcagagtgtttgtggtcaagaataaaaatatgagggtaagatagtgatttcgcagagtaaaagagagattttgcagagtaggcctggcctgagaataccacattgtcaaggagaaccgggaggttggctgatggaaactgggaaattggcagagacgctagcattctatcagtatcatgactggaacgtgcatcagaatcttcacctaataggcatttaaaacatataaatgcaaggcctcactcagacctcctgagtctaaatcctctgtcagcagacccagtactgcccgtgttttaagccctccacatgattcacatgcaagtcctagttaaaagatgctggaggaaagaagttgatgaatttaattagctttcagagaatgcggatcacctaattggaatgttttctagagagaacaaagtaataattaaaaaataattttccagagatttattcattcatctactgaatatttattgagtacttactaagtgtcatgcatgtaagtactagagacacaaagatgggcagaaagcatagtcctgccctcaaggagttaataatctgctgagaaaaccaaacacatacatcgacagttttagaaggcaatgtgttcttcttgcattgagtgtaatgggaagagagttagaactggaaatagagagaaagttttctggaaggagtgtcacctgaactgaaaaattgtctagaaacaaagttgtcaaattatgcagtttagcttgctgcctgatttttttgtaaagaaagttttatgggaaccacagcaatatttatttcagtgttgtctgtggctgctttagcactacaattgcaaagttaagtagatgtgatgaaggcatatgatccacaaagcctcaaatatgtactacatggcccattacaaaaagttggtcaacacctgcattctagaaagcagaaacatatggtactattcaaggaatcacaagcaaagattaaggcagggaatggtagtgtctgaagctggtgaggtggcagagtctagatcactgagatcctgcaccccatagggaacgttcgctttctccagggcaatgaggatcaatgcagggtattaagcagtgacactacagagtcaagcttgaactttggatcgattagtctgtttgcttcatggggtatagattggagggggaaaagactgttagaaaggaaactattaggaggtttgtagaagtaatttatgctgtaattaatgaactgagtagaagtttgaccataaatatgtgaaatggaatattacatgatcattataaagaaatatatctggattatattgacaaggaaagataactacagtatgtttagtaaaaataatcaaggaaactgcctatacaaacatacaaaacatatgtgttactttatgcatagaagaaaaatgaagagaatatacagaaaaatgtcaaaagtcttttgtggacggagaggaggtaaaattacaggaaactatcgcctttaattttacatatttctatactctttttgcataaaaatagattgctttttaattagaccaaacaaatttaacttcttaaagttacttgtagagagagagagaatgagagctcataccatgacctagaacagggaaggagggataaagagaagggtataaatttgagaatgattaggaagttaaactagcaaaacttagtaacgtgagaggtgaagagaaaggggaaaaattacaatgcctaggtttttggtttgggtaactgtgatgaattgtggtgtcaataataaaataaaaataaataactttactgattacttatgaagttcaagtagtcttatgctaactgtaccttacccatttttagtgcatttaaactgtcaacaagtgaaggaggaagttttatttttcccattttgtagatgagaaaactgagcctcagagagattaagtagtttacccaaggtaatgtgatttgtgagtgggttagctgggaaatgaacacagatttgattgattccgaagctgacatgcactcctaccctctcaacctttaatgaatttttttcaagccacatagatggaaacataaaatcagttcaggacatatcgagtcatcaacatagaagttttgatctaatgtgataagctctgaataaataaaacgaaaagagaaggcctcagattgaattctggagaatgtttgtagttaatagatcttaatcacgaaagttttaagaataatggcatggaatatataaaagattttccccttttgttgtgtttggatacttgacatgcttattgatgcagttaataatgcacattaaaaaagaattagaataaaacaaatttgatgcatttttctttacatcaaaaatcataggtctgattttgtcattttaacttagagaacatctgttgagtgctcactgtgtgcaaagcatatcgatgccacagtcttgcctactttaagtttttatgtgtctgaaatttccatggagctaggaagaactaagatctaaaaaaaaaaaaaaaaagcctaattttataaacagatctttgagcagatactagttcaagaactgtctgaaatccttatacactcctggtttccatcaagccgttgctatatgttttgttgaggaagtcttctttgacaacagcatttctagttctggtttggagagttggggttaaaggtaaactgaattgcctgaggaaatgctgtgggcctttgtgaatgggagagaaaacaatgcacctcccactgagagggaagcaatttctcattgtgttacttcaccctggcattcagccaccagagggggcatggaccagagtgaaataaattctgccagctgcctggcctggcttctctgccttccagagaaggaccatagctatcctcactttgagatgggactagagcctcacttcccgtttgatgagaaactacgtgatttactagtaagccatggctgcgctttccctggtgaagaataagacgtgccttacagactccctaaaaggcacagacttgcaaacataacgatggtttttccttagcgctatatcccatgtacagtttacttcctttctaatacgttgttggtttttatccaaatatagatatgagctgtcagaaagagaaatcttgttgtcaagattgaccattcaacataaagtttgaacattgcataaaaatatgtttttgacacagtaaaatgcattccctctatgctcattgtaatttactttatagtgacttgcttaatagcatagcatatatcatttatactgctatccttcatgcttttaaactgtaatatcctttcctcaatgactacttgtcaatttcactgatctagatttgatttcataaattaactaggccaattaagtagagagttatcattagaataagaagtggaagcaaataaatattaatcttccctctctgaatgtcggtatttctacacaactttgatcatacttgaacactacttaatggaaaaaatacacccctctattgtcaatttagtattccccaatttaaacatttatgagtatttttttattcattttctcattccaaatccatcccactttgggacagttgtttctgtttcatcaatataaaatgtggggaatgagcaaatactggaacttcattatttaaggattctcatcatggcaattttcatggcttttccacctggcccctttaccttgtggggtatttgtttcagagctacaggaaccgcatcatatattggtagtttgcctgctgtgcctttctttgtattgctttagtcattttgcaccctcacagacttttggggaaccacttggaaatgacagtgtttgacagagaatagaattggagtaaaatgcccatgatttcaaagtatctctttctaaaatcttaagaggcagggacttctttctctttttcttttatttaaataattcatcttacaatattaatatcttgctctgtcttccttagaggtggaaaagagtttgtcaacaccctttttataaaaatactttgtgtacacacatgcaatgataaattcaccctttttagccttttgttgccttctggatttaataatttcagcttcttttgtcttttaaaaatagatcctatttaccatctttcatcttttggtgatgggggtaggggtggaaagagaggatgcttttctcagaacccttttagtttcttctttccaaactgtggacacattagattgctgtggtaatggaatatcttcccagattcactatggaaagagagaagctacccagaagaggatatgatacagggatctacgggaaaaatcaacttgggactcctgtgttttgatgttgacattgctctcaccgtccatccctaactctgaacagagataacgtgatcatgtgcccaacacacacacaaacacacagtcacatacaacacgctcattcacagaacatacgtactcatgcactcatagcacacatacacacagcacacacacacagccatataagtagcctatggaatattttgggacccatgatggggtgacttctggacttaggtttccctgctagttctgattaaacacttcggatccaaaagccagaaaatcggagcttcttagtctctccaagttcatttgccccttacagcccttcaagcctcagtagttttaccatagtaataatttttcactaagaatttcaaaaaaagagtttgccattggacatcctttgaaatacttagctttgcttcactattttttgtaacttgccaaaatcacaaataaaaggaactatgtcctctaatgcttcttctgtggtcattatcttggaaaatatgcagagtctggtccaagtagagtgctccccaaaccttgctgttactttgagaatagttttaatgaggcttgcagctgagccaagctctcctgttgtgctattatgtgggcatgtggaagccctagtgattgatctgtgtgggggaactggcaacactcgcatgccctctgggtagaggcagagcctccagcaggaaaaattagggaaagagaaaaaacggagaggaaatgtttatcactcatttcctagcattttatggcagtgttacggtgaactgggagatggatgtgtatattcatggattttgcaccactttaagcactaataacattaaatcaaccttaatacttcatgccaaatgtgctctaaaagagggaataatgggaatttttgttgactttagtaaagcatcaaaagttacactggaaacacataaaatgctacaatgcagaggtcacaattatgctaatatcatgataatataaaatattaagtcaccaaaatgacaggatttacaaccaaccattcttagtccccagaagccttagcgataagctcctggtaaacacaacagcctgtcctcccaaggagtctgattacaaatttaaatatgtatatgattagaactctgccagtctcccacccctgaagacagatgaagtaaaatttgatttatatcatacctggaattctattgtgttagattcactctgttttgcaggatcactaccaggcctgatgaattttgtatgtttagaaagttgcgtttgggcaaaacagggactactattaatgatcttgaatagccctgtaatctcatgaactaaaacttaaacattgatacagaatagtcaaatatttggaaacggcacactggcaattggaaaacattatacttgtgttatcttcttttttgatatcctggctgaggtccagggttgaaaagccttttaccctgagccttaatctcatggccttgaatttgcctttaactctctggctgccaatctcattaaagtctcttctaccatggagttccttagacacaataacttgttcattggccatagttatcagggaaggtagaaacatcacagctaggcagctttcctaattgttgtcaattccggccaaatgatgctgacttctatttaacttaaccaatgtcattatggcaataaaaggctaaggaaaataaacgtgcagttaaagcacgacattattgttaaaccaatgcgctttaatatttctttgtgctaaggtacctcagctatttcattatgccaactaagattagcaaatgcatgtttatgaagagtatgcttttcctttttaatgttaaatgcatgcatgttgcctgcacttacagctcgctctagcaagggtaataaatatatatgctttgccactagatgtatattactggtaccatcaccactagtctctaccagcagagtgtagactagccttactaccccacccccaaactgtgaggtccctagtgaagacaggaggtcactgtcacctagatgcttatctagaccacccttcacccacttgtcactctgtcacatcattaatgcaaatgttatagatgacaataaaataaaacaagttacccccaaaggaatttctgtttgtgtgctgttaagaaaagctctaaagccatgttttcaaagtgcagcttgtgatccctagagggtacagcaaagttcttataggagttggcagcatcaaaagaacaccgacactctgtgggcacttttcctcggtcagtctctccatcttagcaagcgccaatcaatatttcttgatctccaattttgtgcaaaactcctcttgtgcttaacccttctggctgtctcctttgccagctccctctttctgggacagaaggaaatgcgtttgtccttttgacaggatgcaatttttgaacacacttatttctttccatttgtgaagaatttcttggggtttcaggctctctagaaccccttgcatgacttagagaattaaaaaaaaaagtatgggaaagacatttccaacattatcaaaattatccttgtttctaaataaatgagattgttttcccctttttctcaggaggcttgagttggctcgtttcccaaactcaaccttttggatagtaaattccttttgaaaagaagcacgaagcccttttgatgttataagtagtatatgtactagaagggagaggatcatggaattgcaacacaaagcctgagagatgtcgctgggatagagtaggtcttattctctactcaacacttcgtaactttatgcagtattagaagatacattttaagaagcattttaataagaactgacagttgttctatctatttgcctctaatacagcgtgagtgatttactgatacgtagatatacaactataactacagaacaaaaagaaagtcagtgaggattcagtcatgcgctgctatcatggcctttaggcaatcttccataaggcaagttacagtctgggattagttctgaaaaggcagaagatttttctgttccatagaattcctgaagaacttccaaggcagtgaattcatattctctccgtctgtctctctctctccctctcccccactctccccctccccgccccgcccccacccttcctccctccctccctccctccctctctctctctccctttctcccacctgtccctgtgcacatctaaatgtacaccttacaaattcacttctcaggatggcctgttgtcttccccactgtgaccctttcccctgcaagttcaatgctctgtttttggcaggcatttaaaaccctgaagacataaacctcactttgtcaatgtggcagtgaggcccaacacatcagtaaaatgtcatggaggtgtcagccctttacatcataactgcagttcatttctctgcattgacagtgatgcttatactgagtaaggattagaatgggcatatttccagatcttaattacatcaggcataaggatgagcaacagcatttttctttgggggagaataggagaggagggagagagagaagggagagtaatgctgaatttggccatctagagcctcatgcgtccccgtttatcaagagataataggattaagttaagctatgggacttctctggctaatgctgccttcagcaggggtctaataaggatagatataattgggtaaatggcgaataagaatgaaaaagtccagagtataagcacaatgcttaggaataaataatgacaaattggattttgtccaatctctgcagacttggttcaaatctggcatcctacactgaattataaggggtaacatctatttttcttcttagtaacttgtctctgttcattgcaaacgtcacaaagtatcttcacaagtttaacggagtctatcagtgctgctcatgtgaaatcaagtaggaactgttaaggaacattcaaataaggttaaagacacagagtaaattaagtgcctaaaaacaaatgtgatacaaattagagtttgtgtctttgacccttatccatttacagaatttaccccattaacagctggaaatttattttcactttcttcacctctctaagaggaaagcaaacatataacacagccccaaaggagtaattaattagatcatttactgacatggatttgaatagtttatttaaatacaattctgttatttatttattttacaacattatgcaagaggttgaaactcctgttccaatttgcacttagcaagaatctctgaaaaaatatcacagtgaaggaaataaacaaagaaccaggatcaaagggccacattcagaaacgcataaaagaatttcaccaggacgtgtgtttcagttataaaaaaatcaaaaaaataaaaaaaaataggaggtggtttgggttgggaagtgagggggaggacaaggctgtttgtttgttttgtatccccatgggcatatttttaacaaacataatgagttcattgaaaagatgctatgtaaaaaggcaagaaaagaaatttaaaaataaaagataccagtgtaggtaagaaaggtataatgaatatgcagattatcacaacaaaatgaagactgcttttgaaaacaggcagtggaaaattcatgaactcagaagcaagttttttttttttttttttaagatacccgtgcaacctcacaaatgatgatagttgtaaattattcccagaaaacgaaaggttcttcaagtatattttcaaaggctggaagtaaaagtaggaaattagttcaccaaaggtgagtaatgagtctcctctagaattaagaaggttttattcttttttgaaaaacaaattatgagatgttttaagatagatgttcacattcgaacctttagataagtaaatggccctataaatgcttgtatgttatcttttaaatgttttcattcagtgggcttttagggaaatctctgattaaaccatcgtatatacacttcagctttattcctctaacctatgggattataatcttctggtcactataactacagaacacaggaaaatgtcttcccagtgctttgattccatacagagtttaagattacagaagttgaaacgtggtggagataggagatgacatttcagaaggggagtggataatagggaagcataatactctaaaacccgaattttcagagagttgaggagcagagtattcctcacctaacacccacctcagagcctccctctctgatctcttgccttcctccctgttcttctgccacacctggcagaagagaccagcgaggtctggtctctttccttcctctctccctgcccgtccttctttgcccaaccttcaccccactgcttgtcactcatgatctccctctgtcagacagcaatttggaggtgccgtatctgcctttctgcaatttctctcttcactttttctctttctttctcagttggaactaaagaattgtgttggtaataaacatttttaaatatgctaattatgtcagtaaattaaaacatgttaatgaatatacagatcactttaaaacaagggagccaaacactatttgttaagaagaaagacaatgctagatgacagtgtttgttttgtgatccaggtggggaaagcaaaggaagacccgagaaagagaaatttgtcccatgttagttgactacgtatgcagtctccctttaatgtggtaacaatgaaaagctggtgagctgatagccaattcaggctaaaatagaacattcaagtgtgcaagtactatgaaacttcagcgtaacttagaaacaagtgaacagaaaaatgactcccatctttgagtggctcagctctgtgtcctggtggtcagttccacagggcagtttatcttgctaggacagacagtagtaacctaaatcagtgttgggctgcttgtctccacccgtgggttttgttttgttctgtttgaacagaaaaccaaggatagcgtttcactaggactatacatttccacagttatacctttattatctatccggagcaagagaaccacgaaatgcgtctgatctctcccactgcatgtagagaaaccagtgaaataaacttggacctgggttttcattcagctctaaaagctaagtcagaatggttcatgcacagcacacaaaatgcccttcacacagcagacagttacctaatggtaaacgatgagggatcatggtttcaggtgaactgtcatgtcataggggcttaagtagcttctccattagaaaagtgactacaggattatgagactgctaatggaaactagttgtcacctcacatgcttttctgtcatcaggctactgcatgacccaagcacctccctcgaacagctttcccctccgttgaaatatgctccttttctccacccaaagtcagcctacggctgaccttttttctggacctcaacagctttgcagatatttccagcagaaatactgcctttccccctaaaacagccttttagaaaggcttcctggttttgtaactttatacatttttccaaattccactatgcaattccatgctatatattcatttagcaaatatttattaagcacctactgtatgccaggtactgtttctaggcactaggagtacagcagtgaacacaacaggcaaaaagtgctgccttcatgaaatttatatttttgataagggatgttagaaattcaaataaataaaaggatcctatggtatgtttgaaggcaatagattctagggaggaaaataaggcaatatggggattatcatggacggcagggttgtagttgtgaataggatggtcagggaacacctcgtgaaaggtctggaggaggagctgaggaactatgtaggaagcactatgagggtgggcccttgtctttctagccccggagactgcattattatctgctaaatatttactgagcattaagttgatctatatttgtcttccttcggagcattacttcatgacagggaggaggtactaacactgtaccttcttcccgtagtgtgttttacagggcttgacctgttgacaggaagcactcagtaacggccaaatgcttgactcagagataaaaatacccagaaaggactgtcagaataataacacaggcatagtggttcctcacaccgaatcccccacatttgtgaatgtgtgtgaggagataaatagtacatgcttagagagatgtggatttcaaagtagtcacacagatcacattcaagtatcccctgagttaaaatacctggtccataagccactgtcaaaagaaaggtgcagtgttagtaaaacagttcagtgtgaggaaaagattctcgtgccagagatctctactgatcggccagcctggcacatgcatgtcactgagagaaataaagtccagggactttaaagctgtggggcaagacacaaatcaaggtgaggggaattgcaaccacgcttcacctgacacccagacccttcacagatttcattttcttgttcccctgacgcatcacagagggaggaaacccagctcatcgggcacttcagttgcttttattaaaaggaaagaatcttttaatatgtggatggaacttcctgcttttggtaaatagaactgattcatggacagggccagtaaatagtacctttggagaggtaggtaggtataaacacaaaactagaaaataaaatcccaagactcatgctagctttctcatgtatagacggtttctcctttctgagtctgtgataagaatctcttatggattcctcgtgtgcttagcctcatctttgtgtaaaagtctgccgcatcccaaattatcaccaagaatccatcttcccgaagatgagacaccaggagcaacagagattggctaaacaggaggtgttttgaatgaaatgcatggtttaatcacattctactttcagaaaactacttcatttaagtcggtgcttgcctggggtaataatttatgctccacacttgagtaatcaccaggaagattgctcggtacccatcccatcacaaacatagccaccagtattcatggccttaagtcaacttctggaaactttggatctagataatctcagcaaaatgcagacctctggatttagaggtcccccgactaccccaccttcatagagaagaatttcatttctcatgctttacattaacatttggaagtgaagcgtgtcctcttttctcctaatcaacatattttaaaagacagtactcttgaacattaaaaatgctcagttttctacgtactatatattttgtctcacaaaaatggaaaactacagaatgtcagccaaaaaaccattcatttttaaatttgaatttttttcacaagatctccttggtttcttctctccccacgttagaacttacccacattcataaagtgcatttgaatttgcattttttttttcaccttctctctctgccccaaggagggtggcctcatgtgagtgctcaggttgcgtagtgaacaaggatgccacctctagggggtcatagtatatgaatgtgagtggccgcctgcactccccaggttctggatgtggatgtgagcagggggagtgggggcaggttcattggtgcaggcagcctcctgtaagctctggaaagcaacccaggcagaataaccaggcctcactgtatggttgtccaagtcctgcactgttatactaatgtaaacatcttttacccatggaaggaatgcattttttttttttttaattctcacaaagtcatgtatggactggctgctgttctggtaccaacacaagtcatagagagaaatagatagtctaacggcggccaattgtgataacattttccacctgtccccaaatttctgctgtataaattgtttctttctcccggcgtcctcatctgtcttgattttccttcagcttttctcagccctgagcatgccttcttttttcagcaaccactaaggttcacagaatagactatgttactaaattaacataaaagctctctgtgtttacttaactactcaaatcacttatcttaccagaagcaaccctgggctaacaggggaaggacagtggctaagttttattgcaactctaggctgtagatgcactaaactcctgttagctataacccctgttatacatgaagggaagataattgtctcccaagttttcagttgagaagaagctctcaagcagtcttgcttgactagatatttaagttggctagtcagctcggtcagagtacattctaacaacccaacacctgtgacccagcatgctgaggggcccggcagattcctgacagacttggcccctcctcaggcaggcctggggactcctgcttttagaatgtaatttttcttcacctaacctttaaactattagttacctcatcaatccagaccaaactcagtagacatttcactaaaatgaatagagacagagaatatcactttcctgatcctgttcagcaattttcaagccgccttggcctcctattgggagccttcatgcttggtttgtttatgctctcagaagaatcagttttgaggtgtttattccagtggttaaatttgacgaggtgaagaaaagtcaaactctccccaatattgcctaggaagagtctaaaataattggtacgtatttcttacatgtgaggaaagaagagaagcttccatttctttataacagcagagtttttcagacttcttggccagggaaactaaaaaacaaatttgctttatcttcaaaaataaagatgcttatttcttccttaacatgcatagcagatattattttgtaatgtaattgcccacttaaatttttgtttcatatttcttcattctcttaaccaagtcccagacataatagttaaaattagtggatcatctttctgaaattatacattttaattatgattatttgataagcatttcaggcaaactcgcccatatatcacataaaatcagaaataagtgtgtatatcaatatcagtttaatcccaaatggaggctttatttaaactatcgaggacttgattacaggagcttggagattagaaatgagatttacaataggctagagggaaatatttaaatatctttgctagagcaaattatagtcatttttaaaaaggcttacaatatgagtgtactgagaatttcctccaatgtatccagttattgaattatgcttctttcatagtcacctcttcaacttatttagaaaaacagcttacccataagcaaggaacatctaggttctatcatacagccagcaaagtaagcttttcgtggaaaatgtgagttctacgtaattttccatttgaaatttcctgtaaaaccaagggtgggagcttgtctacttctttttgctgtgctactaaaagaaccaagtacgtgttatttttaaatattttgggctccaaagtgaggctcatgagttaaccatggagttactgaataattatttctgatacacttatatctgtctttcgaattgaaggatcttccatgtctacaagtgtatatttgttgaatggatgaatttaactcaatagaaatggattaaacattcactgtatatgaggccctgtaaggtggtacaggagttatgaaaggaggcagagcaggtaaggggctgggataggctcaaaagggaaaatgtgtttagatgaggtggtgtcacttctctgggaaaagaacatttagatagagctctgaaggaggtaagaaggcattggagtggagaaagtggattctaagacagaaaacagcatcagtaatagtctaaaggtgaagagatgctagaggttttaggaaatggaagggaagtaagtgtgactacagtttagtgaacaagcaggaaggtggcacgagataatttggagaaagagatgggccaccaagagtcttaacggggctggcaactcttttgagttttatgtacaatggaaagcatgcaagtgcttttacgcagccccgtgcacagactccaagtcttcagttctgcactagttctatcagagtagtctgagagcgagcctatctgtttcccaggaagctccccaaaatctcattttaggaacccaaaatgaacacataccttaaaaaggtgatatttttcttttctgttagaatacattaaacaataacatttccctgaatgagttcatcatattcctagagctggctcagagtgttttggggttttactgaacaggactgtctgtcctatgatgggaatatttgttccctgttatgcctatgagttggatgttagcctgagctggaaagctgggtggagagcttccctgccgtctcgctggcacagttctgggtgtgcacagagctggcagaactggagaaatgcgctttagttttagtttacattctcacccattgatactatatctattgaaggagtgttttccatattgaggtgccgtatgaaagtgtaaaacaccagcatgtgcaggaagtgtgaacgtgggcagtgattttactgttgtttttaaagatgctcacatgacaaagcaggcaagctcaaaattgtacccattctccctgaatgctatagcagtaagcccttaactcgctttgaaggtgacaaaactgctaaatttagctttgagtacaccagtgatacttagagacagtgagggttttggttttttttctttgatagttatctgatgtgcattacagaagtggactggaattacattttatttattttatttttagtggaattgaatttagtaaattgacagaccgaacacaaataatctgtgtacaatttctactctttcggattgactccgaaggaaagtcaatataatatagggattttgtttccatgacatcagacttcacactagcacatggtaaacaataactacagtactaaatataggaatatgcctgtatcagaagggattttgatacaatcctgtggctgagattggtttcattgaaggcagagactgtgtcaatatagaaaatgttgtatatttgatattttaaaaaaacagcaaaaaagttatgcaataagaaccatccattcccataatggagaaaggaaatacatcagcaaaagctaggctaagatgtagcatatatgcctccactttaaaagaatgtaaacttgtattgtaatatttagcaaatataattgtaattaaagtggttgtgctttaaaaaccaaaattccttattagttttttattttagttgacacacaatattttgtgctacattttggcagatatgaatgctgctgtttcaagtgcaagaagagtaacctccagaacatattataaattggctggcctcagaatagggggagatgattagattgtcgagtttcctgctgagtggtacatgcttgttttgtaatactgttttatgagtcggagattcaaacagaacatgtaggtccaattcaatacctcagcattgttgatctgctttttattgatttttcatctgttcaaatctagagttcttggtaggtttcaaggatatcatagcaaaaggttgtagtaaaagagttttaattagaaatgcattgttttcactaaaatatggtgagctgttttgttgctttttggctttgctctatcatattcatgaagtaggatctttttatcaagaaaaaagttctctttgtgcaaggcaaagttagagtactaagaggtttatagattttgtgtctgagcatcactgaagacagtgacttaccctgtattcgtttcatgggcaggtaaacattctcatattaaatagggagacatggtgcctatatgtttcgaacccattatctgcctgatcaatttttcatagcttttctgttttatattactaaataattaccttatgacacttggagagaaaattgctaaggatgtttatgccatttgaaattagcatctaaaacccagttatatttcctttttttctttcttatcattgcctctgttaatttttcttcaggatccattgaacagtatacagtgacattgtaagagggttgtacttcctcacctcagtgccttgttaatgccgttcattaatctagaacctcgagcttgttcagagatggttagatattccatatttccatggagttttggagaagggtgacagcttacttacagcttctgcaaccagacctcgttggttgtcatgtcatttttaatactgataaaatggaagggcatgcacatgaacttagagcctttgaaggcaggaagagaggcacagtggcacacacaacatacacagtcattccgtcaccctgcactgtgctggaacaaatcaagtccttttgtgtttgtttacctccctgtttgctttctgtacctggcagagaatgaattcatgtccaggagcaagctcctctcctagagagcctcagatgccgctgccagtagcaccaccaggcctggcagccctaaagcgcatttattctgagagaccagttagagctgacccaaagggctgaacccctagcccacaaagcaaaaatacaatttttcactgcagcagcagcagcagcagcaacagcaacggcagcatctccttatctgttcagtttttctatcttgtaacctcaaagcagattcctcaaccctaccatgatttcaaatttgaaacataaacaatttagtagcaaaacatctggggacctgggtgaaaagttattgtgaacaaacctccacaagtaaaaggaagacagctacaaatagaaaagccatttttgatatttccaaagccagtccttttgctgcatttcttatgagagatgaacatttaaagttttttttttttctcaaagcctaataagggttatggagaagagaaataactgactcagcgttgtattagggattacacataaagccaagattcagacacagtcttctagatctcagaataggccattctggtcctgcgtgggtcaagactgtgtgaggcctctggatggtgttatccagtggaaatttgatgatggaaacattctattttgcacagtctaagatggtaggcactagccgcctgtggccgtgagcactaggattgtggctcatgcaactgaggagctgaattttagatgttctttaattataattaatttgaagaggcaaatatggttggtagctaccatattagctctagtatcataatcacaaaacttttaaacctttaaataagtatactgagttgtttggttcaccttcagaggataaaatattttgtattagaaagtacagtaatatgttactctgcactataatactttattctacttaagcctgtaagcattgcttgtgggagtaaatggctaagcgtattaattgataagtcagaagtaatggcagtatttgcatattatcatatatggctgaaagtgcttgtgagtgtgtgtatgtgtgttttaattatctctgctgaaatgtacacatagccaaatgtatggtatgtgcagacaaacatccaaattgttgaccgaattctttttcacccagatttattgaaattgggtaagccattcactcttttgtaccaaaactactgaaattgggtcaatgaggctacagtttgagtttttcttgaggttatgtcaagatagtcctataatcaaagtgctatgcaaacattcagagatgttcacaggcagggtgataatctcactcacttagggatctatgctgccttcaatacagatgtgtaaccccattaacattaataagacttacgctcacatatcgatggagagtaaatccctaattagcagtgagaactgttaacacccccactgtggtaatacctctgaaagattttcatgttgctgtgataataggcacatctgtaaaaaaaagaatattttaaacaatgtggaagttgacacacaatcaagcctgagacttatatacctgtaactgtcacaggtaacatgcttttactaagggagtctgggcctgaatctgataacagcaggcagaggaagagattattctttgcatttacttaggaggacatgaatgtttctctcatgcaaagaggagaatcgcttgctctttctcctacccaggatggtaattattctgcaaagatgtgtagaagatttcatcaaaggactagtattcaaagcagtggcctttcatcccatttagaatgtaatatgtaaataggatacacattggacatggtttggctcctcttggtaacggaaaggacatggattgaagcaaggagcttcccatccacagcgatgtgttattgatgagctggcatttgccctgtggccctcccagaggattgcttacatctattactcacacacatcgattggttaatttgataattctatcaccaatcagctggtgtctgacctttcaccatggcaatgatggcaggctcttcatttttacattgcagacctgttagattgacctttttgaggagaatgtcaaggcatcccttgatcttaacctgtcactatatttgttagaactacactgtcccttaacctcgatttatggtatttcagcactcaggatatgcattttgtttattttaaaaattcccggtaaggtatgttgacctgatgaggggagttttacaattaaagttacattctcactgcgtgagctttgtgcgcaaaaaccatctggttctctgtttctcctttcatttgacaagccagtttatacttcccagaaaacttctcatcatcattttggtggcaaattaaaatgcaaggtggtttttatggtattttgtgcatttgctttcttttgctctctcacacattgataaaactgaaaaacccctttaaatactttctgacaatcgggggaagatattatggtaaagttctgtttgctctcttagtcttttttttttttttcacactcctaatttatactcttgccagagggaagaaattgtcttgtctctgtgctgctcctctgggagcaatacaagggcatcgctttgtgactctgaaaccatagatttgctcttcagttcaacgacaggcagaatgaaaggaactttctcaccgatcttcctgtgtgtgtttgtgtacccacatgttgtgtacatgaggacacatggatgtgtgttaaggcgtgccccatgttacctcagcccgctgtgagaggcaagcaaagagatggtgtgtaattaaggctctgtggttatctagctgaaaatagagggaggggctagcccctttgcttccctgtgactaaaaaccagccaaaccaatttcactaaaatttagtaaaataaaaactgtgctcccaggatgagaagtcgcatgccaaatttcagcctgaagcgaatttaaatggctgagttataaacctttcataaaggatgttttgtcactcactaaagataaaaaggctccttttttgaaaaggaaattatctaggcacatagtctttagcggggattgttgccatttatttaaagaaaacacaattttaaatgactgggtttttgaggactgaaagcagcaactgtgtctgagcagtaattatgtttcataattttgtttagcaagtattacatattatatgaatagcatcatcgtaaaaatgattagcattcatactatgcaaaattctgcatattaagagctccacagtagtgtcctacatacaatacattgtaatggctccaaattatattgtgtcagctgagctctctgtttctccagcgtgccctggagcccagctcggtgccagggctcagaagagacctcagtttcacatcaagcactaggagaacaaacacttccaaaacagctttagagaaacatttaaagttgaagcaacagtttcatcaaggatgcttgtgttattttatgtgttctgcaagcatagaaaaacacctgttagccccgctgtgtccatttttttaatgtgcatgcagtgtcgctgtgtgaaaccaaaggagaaggctacgccttccacaaatgatcccttgggcatgatgggacgtactgactgtgaggtttctgtcttagatcttgtgtttggaacctcagtgtctcaaaacaagttgcttcccaatttggggaccaggctgtgaagtgagactagtgacgtttcagctggggaaatgtcagacctggatctacagggacccagactctgagagagacttgttctaagagatgtaaagtttcaaaggtcagaaatatatttctgccataaaagctgtttttattgctattactgttgtttaaaccataggtatatatttctgtttccctaatttgttttctttttacagtcaacaacattccttacaaagtctaaaattaataggagaaataaaaaaatatatgtcactgcccttcctcatggatttcttatgaaactgtagcttcatggtcagagtacctcagaaaagacaaaaacagaagggagtttaaggaaggcgcctaataatttgttgcacagcaatcactgagccatgcacaacccgcagagtctcagttgggatttttctttaagacatgcagtacctccttcagttctgctctgatcttagttatttcttgtcttctgctagcttttgaatttgtttgctcttgcttctctagttcttttcattgtggtgttagggcatcgattttagatctttcctgctttgtcctgtgggcatttggtgctataaatttccctctaaatactgctttagctgtatcccagagattctggtacattgtgtctttgttctcactggtttcaaagaacttctttatttctgccttaatttcattatttacccagtaaaggagcaggagcaggttgttcagttttccgtgtagttgtgcggttttgaatgagtttcttaatcctgagttctaatttgattgcactgtggtctgagagactgttatgatttccattcatttgcgtttgctgaagagtgttttagttccaattatgtggtcaattttagagtaactgtgatgtgatgctgagaagaatgtatattctcttgatttgtggtggagagttctgtagatgtctactagatcctcttggtccagagctgagttcaagtcttgaatatccttgttaattttctgactcattgatctgtctaaaattgacagtggggtgttaaattctcccactattattgcgtgggagtctaagtctcattgtaggtctttaagaacttgctttatgaatctgggtactactgtgttaggtgcatatatatttaggatagttagctcttcttgttgtgttgatccctttaccattatgtaatgcccttctttgtcttttttttaatctttgtttgtttaacgtctgttttatcagagactaggattgcaacctctactttattttgctttccatttgcttggtaaatattcctccgtcactttattttgagcctagaaggagacagagacccaaaaatcccttcaaaaaaatcaatgaatccaggagctggttttttgaaaagattaacaaaatagatagactgctagccagactaataaagaagaaaagaaaggagaatcaaatagacacaataaaaaatgataacggggaatatcaccactaatcccacagaaatacaaactaccatcagaaaataaacacctctatgcaaataaactagaaaatctagaagaaatgtatagattcctggacacatacaccctcccaagactgaatcaggaagaaatcgaatccctgaatagaccgataacaagttttgaaattgaggcagtaattaatagcctaccaaccaaaaaaagtccaggaccggatggattcacagccaaattctaccagaggtacaaagaggagctggtaccattccttctgaaactattccaatcaatagaaaaagagggactccaccctaactcattttatgaggccagcatcagcctgataccaaagcctggcagagacacaacaaaaaaagaaaatttcaggccaaaaatatccctgatgaacatcaatgcaaaaatctcaataaaatactggcaaaccgaatacagcagcacatcaaaaagcttatccaccacaatcaagtcggcttcatccctgggatgcaaggctggttcaacatactcaaataaataaacgtaatccatcacataaacataaccagtgacaaaaaccacatgattatctcaatagatgcagaaaaggccttcgataaaattcaacacccttcatgctaaaaactctcaataaactaggttttgatggaatgtatctcaaaataataagagctattgatgacaaactgacagccagtatcatgctgaatgggcaaaagctggaagcattcccttagaaaattggcacaagacaaggatgccctctctcaccactcctattcaacatagtattggaagttctggccagggcagtcaggcaagagaaagaaagaaagtttattccaataggaagagaggaagtcaaattgtctgtttacagatgacatgattgtatagttagaaaaccccatcatctcagcccaaaatctccctaaactgataagcaacttcagcaaagtctcaggatacaaaatcaatgtgcaaaaatcacaagcattcctattcaccaataacagacaaacagagagccaaatcatgagtgaactcccattcacaattgctacaaagagaataaaatagctaggaatacaacttacaagggatgtgaaggacctcttcaaggagaactacaaaccaccgttcaacaaagtaagagaggaaacaaacaaatggaaaaacattccatgctcgtggataggaagaatcaatatcatgaaaatggccatactgcccaaagtaatttatagattcagtgctatccccatcaagctaccattttctttcctcacagaactagaaaaaactactttaaatttcatatggagccaaaaaagggcccatatagctaagacaatcctaagcaaaaagaacaaagctggaggcatcatgctacctgacttcaaactatactacaaggctacagtaaccaaaacggcatggtactggtaccaaaaaagatatatagaccaatggaacagaacagacgcctcagaaataataccacacatctacaaccatctgatctttgacaaaccagacaaaaacaagcatgaggaaaggattacctatataacaaatggtgttgagaaaactggctagccatatgcagaaaactgaaactggaccccttccttacactttatacaaaaattaactcaagatggtttaaagacttaaatgtaagacctaaaatcataaaaaccctagaagaaaacctaggcaataccattcaagacataggcatgggcagacttcatgactaaatcaccaaaagcaatggcaacaaaagccaaaattgacaaatgggatctaattaaactaaagagctctacacagcaaacaaaacgaccgtcagagtgaacaggcaacctacagaatgggagaaaatttttgcaatctatccatctgacaaagggctaatatccagattctataaggaatttaaacaaatttacaagaaaaaaacaaccccatcaaaaagtaggcaaaggatatgaacagacacttctcaaaacaagacttttatgtggccaacaaacatatgaaaaaaagctcatcatcactggtcattagagaaatgcaagtcaaaactgctatgagatgctatctcccaccatttagaatggtgatcattaaaaagtcagcagacaacagatgctggagaggatgtggagaaataggaatgcttttacactgttggtgggagtgtaaattagttccaccattgtggaagacagtgtggcgattcttcaaggacctagaaccagaaatacaatttgagccagcaatcccattactgggtatatacccaaaggcttataaatcattctgctataaagacacatgcacacatatgtttactgcagcactattcacaatagcaaagtcttggaaccaacccaaatgcccatcaatgatagactggataaagaaaatgtggcacatatacaccgtggagtactatgcagccataaaaaggatgagttcatgtcctttgcagggacatggatgaagctggaaaccatcactctcagcaaactaacacaggaacaaaaaaccaaacaccgcatgttctcactcgtaagtgggagttgaacaatgggaacacatggacacagaggggaacatcacatactgtggcctgttgggggatgggggggctagggaaggggttaggagaaatacctaatgtagatgatgggttgatgggtgcagcaaagcaccatggcatgtgtatacctatgtaacaaacttgcatgttccgcacacgtatcccagaacttaaagtataattttaaaaaaagaaagacatgcagtaccacataaggaaggtttatttttaaaatctggggatgggcagttttaaatgaatgagagagagagacagagagagagtgtgtgtgtgtgtgtgtgtgtgtgtgtgtgtgtgtgtgtgtgtgtgtgtgtgtggtgggaaggggggtgtatagacctatagatgaaagagacggctgtaatgggtaaaagaaagttgtgtgattacacaggaaaaaatttcttttaagcacaagtcattaacactgtaggaaaagccctgaaacaagtgactataaattagttaaaacttagttagaaatttaatttttccaaaaaatattatcgaaaagagcaccatgttcaggcttgattcctttccagaatcagacctcagagactgttgggaaccttttggtttaatgttataaatgaatccctaggaaaataaaatattaaatttgtaagctgttagtaccctatcttccttttgtgaatgcccttcaaatcctagaggataaatttcaagatttaaacccttttttaaaacaaatagaaagaacgtaaaatgagtctagatccctattttcccacagtgcttaaagatatcatttccttagaaatgatatcttggcaaaagaaagtataagtatactttatactttcttcagccaactgatgaaagacagcaaaatattctgagatcacttgtaagctccagcacacctcaaggtctgggaaatcctccataaccctgtgcctaactaccacatgaagctacatcagcatgtttttgatctgggtgtgcctcccaacttgcttaaatctagcatttgcccatgggacaattataatagaaaccttctaattggttactgatgatgcccagccctctgatattagtaacaatatttgcaggctgaacagcgccccacacactgaaacctgctgatgctcctgttgtatggatgctttctttctcatttttcttgctttcccgctatttccaactgtttatctctggcagccttctcgcagtgaggcacaggaaaaagaatgcctggtctgtgtttctttttctcctctgcgcaactccagtctttgttttgtttctgtcttgtggagtctgaacggaagaaaataaaggaatcaagggttcattgcatttctcttacgttctccccattgttactgcccttcctcactgatttcttatgaaacggtagctttagggtcagagtaccctagagaagacaaaaacggaagggagtttgaggaaggcacctaaccatttggtgtccagcaatcactgagccatatacaaccaatcaaacccacagagtctctgttgggatttttctttaagaaatgcaataccacgtaaagggaggtttatttttttgaagctaggaagggcggggttgggagtttaagaatcccaagaagtggcatttttagtttgaagctggagttctctgaaggtaaagctacatgaatttctctctggggtgtctttcaaagtaggtttatatgctccgaggaaaagataaggggaacaaggaagtcccttagcctgatttcccaagtccgatcagtgcagcggaaccatctagaaggctgctacagatgaatcgggtgtggtttttaagtaacatgaagatgacccaaatgatctggaccagcagaaggcactttttccgggaccaagttgttgttattgttgttctttccatcaagaaaagagttaccagaggagaatacggcctcattcacagaaatactatgcaaacttctttagatatgattcttgtctggcttggatgtttgttacatcagctttaaaaaacaaaacaaaacaaaacctcttcagttgtgggctctcactttctgaggcaaatccctgtcaggcagggtaaccataagcagaatttgttgtttttggtagaatatgatctccaaacatgttttaagtgcaatccaaactagatttaaatgtcaccgatgaaaagagaaaagccagcagtccgttgtaagagctggtgggtcatcactggcctcttggcccaaagaatattcaacacagaaaaattccacaagatgggaataggcttccttgctaattaggaacaacttataaaataaaaaccttagaaaatgtttatttaaaaaatattcatacttaggatgttgtctttctctttgatttacatcaagagaaattattttttgtgattctaataatgttagctaccagaagtcatatcaatatatttccttgaaaataaatccttacagaaatgatataaattagagtgtgtgtgctaaacatatcccatctctccatccattctattaggcactattttaatgaaggttttctttacgcaggaaaacaaaaagtaaaacagagtatatctgaagattaaagtcaataataaaaggagcaataccctctttatggtggtagcctgcacagctcagtaataggtattttgcataatctataaatagtttgatttattgtctattggggcagtagtattaaaaggtggatttgaaatccaaatctgttattctccttaatgtttaacatttactttaaaaatttatttttatgtaataatatattctactaaatattggccactctccttcacaacaataatacacaacaaagtaacatgttgcaaccttcctgttaccctctctgctttctctcatcagatattttgaatagaatctttcagattcctatttcttgttttatattagtctcccttctagaatctggatttgttttttttttttttaccttcaaaaacggctcctgtgtctagatttcaggttcatgactagggtgttaacagtcctgagctgcttctgaaccttagcagcaggtatagcctgcagcagctcagggaagaaaggctctcctaagacctcctttaagagatctgatgttgatttctaatttctgtgttggactttcatgtgctaggtgtcacagtctcaggaagttgtatgtcacaaaacaaagagataactgcgttgggaactttctctggagcacatttatacgttaagataaaaagtgaatcattattcagggaaaggaccctgtgagtaaaccctctaatgagctcaagtatcattatttcatctaattcatccaattgctccccatccaaaaattaatttcaagccttgagggtaatacaggaaaataaaatattatttatgggttcccaaatctatagcagcattaaaaatgatctttgtacttattttaacaccccaggtagaatacactgaaagtctgctaaattaaaagcaaatggcagctggggttagtgaaaacagtggggtgatttatgaaaagcacctctttttttctgtttctagctctaatttaagtgcattttctatggctctcccccattttttttttaacactttggctttttcctccccttttcttctctcctcccagtggagaaggatccttctatgctgctagcgccctggcatttacatctagcttcttacccatcatcctcattgctgttagccaaagatgagctcctgtgctgctcttcgttggggagagccctgtcctgacccgacttctgctctctgttcacttgtgaagtagtcttagttgtatctttgacttcgtgtgttttctttctctgcccaaaataaaatgattgcaaagccaaattctgttcttactttctagagaacttcctccaaataggttcgtttctacacctctgcttacccctgttatgaagtagtatttttgtttttcttcttcaacgtaatcttctccatctcttctctttactgctgctgcgccatctccaagcctctttccttaaatcttcagaatatcatgtgctaaaaccttctcctagtttccttctcttctgtcttacagtctatcctaataacttactgcaagctgtcccccacccataaaagctgcttctatttcttaccaatccgtctctgcactgcagattgagtcactatgttttgggtcttgcttgaagtaagaacatttcattcagtgatttatggaaacttgcagatctagaatatctaacacactccaaactcagccactcacacagcaactataccatctatactctactctccttgttgccttttcttcatgagtatagttcaagcagttacttcaaaaaatggcatgtattaagttctctcgagatttattctttgttaaatttctacagtaatcagaatataaccaggaatacacataaaatgatggcagaaaaaaatatcaatgcaaaaaccaaaagtaattgcctttgtcttcttaaatagataagtgagacattaactggaatatataacaatatcaacaattatagtagtagctgctactccacactatgtaatactctaatattagtcatatattctaaatggcttgagttcccatgccagttgaaccacttactaactcagaggcaaaatacttataatgactataataatgttcatgccattgaatggttttagggacgaagataatgtatgaaaacatgtttacatgtggtagttgctcagtaagtgatcagaaaagaaaatagcaagaccgtaattggtgaaaccgagtgatacctttggattccacagcgccagtgtgctttatataatccagttaacacagagcttctccaggccatattgtgctatttcttgcttctttcaaaaaaaaaatggcacggcaatggggcaaagccttatattctcatatatagtttattgagcctcattaaaaatgtaattcattaaaaactgcatgttctagagagcttgatgagaagaaatatgacttgatacttggggaaaatccagcccctgccagaacagatgaagggaaagctgaaggaagaaaattactcccaaccgaatctttttcctacattgctttgtttatccttttactctacatttcatttttccctttagggggagaatttatttagtgtacaaggaaacattcgtaactcaatagtaaagaattaattgctctgctaaaagctaattggtagaaagaataactaaatatttttagaaaaggtcctatgtacaacaaccttatctagacgttatgttatctagacattattccaagtgttgtaaaaattagtatcagtgcaaaactacaattactgacacccaccgcacatagggtgttggccattgcttccagaattttccacacattaagtatagaaaagcttagagacctaatacttcaagtctaatctttttagcagagagacttaccagtggatctcaagttccatgcttcatcatacatgaggacccaattatatgtagcatggactgagcaggctaccatcttgaattcctctgtgagctgacttacattgccaggcctttttttcttatgttgtgtgttactgtgcttagcagaaggttttatattgcatgtgctttgaggacttcacaaataccatagaatatgtaatgcgtttacaaaactaccaacaataaaagctggcatgagctttaagaaatgtgattcccaagacttttatatttctaatcatatgcagaacaaactggttttagcttccttggcatatgggatggaaattctctaacagtccctttgtagcatttcaaattggctggccattttaaaaggtaacagcccttttgcagtagaattaaatgaattaaattgttaaacttaagtagaagattttatgaattgatgtatttttcttcagttccctattcagagttgcatctttaagggctggtttaagcaaatatttattcagcacctactatgtgttggcaattcttctggctgtcagggaaacggtgcaaaataaacacagtccctgctatggtgatgttttgagactttggggaagttacagacaagtaaattggcaattacaattactgctatgatagcagaagaccagcatgctatgggattctacgtgaggaacacccagtaacccagacttggaagacagctgagaactacggagacagataggaattaggcaaaagaaatggggagagaaaatgcttcaaatgaatgggagaacatatggaaagaccggccaataatttatgtctctctcaagtaaattgaatgagtattttagacaaatatttgcttcagtactttaaataaaaattgtggaagtttggcaaggttaacaagttaatacacacagcagttatttaggtatatatcatggtcagagcattctcagtatttttggcaaaagtttgttaataacaagaatacatatcagccagcaaaatattgactatagagatttaatatttattaacagctaagaacttatcttataatttcaattggcagctcaagataaatattatagccacataataggtccacaattgatggcagttgaatttttaatggaagaaagtggagaaaagttgtacactctctaggggaaaaaaatcaagtttcttcattccaactttagcaatttctgttttgataccctacagacatgttccttcgaaagttttgaagaaagcccacttgctggaaattcacatgagctgaaataacatatgagttattaaaaggtctttcagcagaactgggattaatttccatatccctcaggagcccatctgcactcccttatcacacaaatggaattttggtatatgggttaaaaattacttaccaaaaattaaattaaaaataactgagccatagtcaaatcagcaagctgtatttgtcttatttgtttatttattcaaaaccggaaaaaaagaacagaactttccaaattagggaaattatttcgtatcaccatcatgtcaaagatacacagttgaacaccaataggcagttgcattcaaatgccctgatgtccattggccttcaagattcttcctgattggcctccatctcccctcttcccaggctgcttctctgacttcacttcccaccaccctctcccttgtctgccctcctctggctcactgaccttgttggaatatgccaagctcactcttcttcaggacttttacatcgcctttctttctgtcagaagtacttcctccagccccatatccacgcgttctttcttcgagtcctcaaatgacataagactcccttcctctcagtataaacaagcaacactctatcttatcctgctatgccaccctgccactccctatcctcctccttaccccgctttatttttcaccatttcccatagtgccagccaaaatactatacatttatttacttgttcgtcatctgtctcttcaaacacaatacgggctttataagcaaggatatttgcctgtgttatttattgctcaataaacaatcttagaacagagcctggcatatagtaagtgctcagtaaatatttgttaaatgaataaaagcttaactacagaagcaggaggtatctttccttaaaggtatataaatatatgactttctgcaatttgcaatgctgcccatatataagtgaaagatactatccaagtgattaaatggaaggattaaaaggagactccttccttgtatctcatatttacatgtattgttgttttcattttttgtttgtttttacattgtcaaatgctctccactaaatggtaacaaattatatgctggttacaacatcacagtctgacatttttccatccaaaccatcttctacgaaataaatccacaaattttgtattgatatgattataagagatctttgtagacaatgttagtgtatggtagacagccagaagccataggctatgatccagttaactctttattgtgattatcataagcattaaatatttattgactatcttgttgtgcatatcacaagggaataaaaattcaggtctaggtagattactgtgtaggaagacagtctcccccctaattccccacacttgaagtaggaatttgtatgttttctatttatttttctccgtactgctgaaggtcttatttcactccttcttgacttttaaaatttcctcctattcaattgtaaacttttgaatcattgaacattttgaatccaactattagcttttaagttttaatcaggccaaaggagatcaacaataaactcagattggaaaaaaaaaaattgtattgctccatgaggagtgacgtaaaagagccatctctacttcaacacatgaaatgttgtgggtgatggactatgatgttcattttgtagaatgtaatgagcatgtggagtttgtcacaccccaacccaaagatctaaggatatttctgatatatttgggatgttagcccaagtagagaacgtaaggatagaatgcagttttttggttaccggagagaagttaatggaggagaaatgtctcgtctcagaatttgctgctgttttcctttatgtttctagtaatatctatttgtgatcaaatagaaatagaaataaataccttagactgccatcttgtgcaggaagtaaaacagcaggacattcaagtaaaaaagagttttatgtctgtttatttgtggcctttgaaacctgcttgatcttttcagtctttttgatcctgaagatgtttgcccacaccctccttgtattttgttctctgaattgttcattgttgttctttcccaagcatagtaaggttattctttttattatataactagtagaaagaggctttgaaaattttcattttcaaatggaattccaattcagttttagcctactgttctccctcattctgaaatgtgccctgaccatggaacatggaatttctatctaattttacagaattcaaattatcgagttctgtttgcaaaacattcttgctaaatttctttgtctaataaatatcaagagttaatttttctctgacaatgctgttctcttttacttctggtttggagtctgtgtttttgtactttctctttgcttgttcatggtacacacacataagcactttctggttttgatgtgcgattagtttccatctttaatgtggatgtgggtatatgtgggtgtgtctctgtcatttttttaagactaagcctctccttcctactccccctaccctcatcaagacgctgagaggctcaagttgctgccaagggactcttccatgagagcactcaacttgccatggaaaagtttgctaaggtgccattcaatctcctagtctccatagcaaataatattgccattgtttctccaggaaaaagcagcccgcattcaggtttccatgtttcctatgttatggcaaaaccagcagagaaaccttcccagtcaaagcagaataaaatttacaagcagtttgcttgggcaaaggagccaactgcacacacactgcttgctgtttaattcagaacaaaatcatatctgttcttataattacgtgacaaatcacgccttccagatgcattaccaaatgcctgaagaggtgaagcctggattttcctcagcactatgaagcagtgaagcaatgccgaaaagggggcttagggggatactaagtacgaagatgtaagtttgaggagggatagatagccagccaaaaccagatttattgaacttgctgttttacaccatgtaaatccaaaagactccagaaagtaaccttctctttctctgaaaagtgcaaataactctggggtgagttcttagcatccaggaagccaaccacacacagggctcacacaaacgcctggttggctgtcatcctccattatcctcagagggaatcagtaaacagaagctgcttacagccaggaaggagagagccaggtaacactcttactgcccgtgtgagagtatatatgatcatttttaaagtgtacttgattgttttcatgaccccacacaatttcctaggcctcccttaactgtggtatagctgagaaaagaaaacattcacatctagatggggtcagaggagtagaatgagcgtgggaatgaccagactttgacatcactctcacccctgagccttcatcccctgacaggcccatgggagcccttagctgccctgcggtctctggcatgaggtctctgttcatgctctaagagtgattttactgtttcagagggtggtggcctgtttgtccttctcaagaaaggtgtggttctactcaatataacctttaaaggttatccaactactttttttttttttacctgagactatatcctatatgtaagtaagaggattcaatagtcttaagggggtggtattattagcattatgatttctgttgttataattgattcttgatcatatattgctttgtgttatcgcttggcaaatcatattacactgatgactcctttgtttttattcaacttgttacattttaatatgtgattctgccatacagattatgaacttttctagggcaagaacagaagagaatctaagcgctataaaggagttgagcaaatatttgacctactctttctcttctcctctattccattttacagatgaaaaagctgaggacccagaaatacaaaatgacttgccctgatccagtagctacttgaaagcagacagatctaagacctggatcttaattttaatctcactgtcctctgcacccttctcttctagttctttcttgtacaaatgactatataattaaatccttcattatgtggattttctgacctagagattcagactggaatgactgagggtgtgcattaggctcagttaaggagacctggaggaggaggtgggacttccttggggccttgcgtaattcactaggtacttggaaggaaagagtaacaagtccagttactctggtcttcagtgtactggcaagatcactgaactaatgtcgggaaacctgccttaaccatgaaattagggcatgacttctgaaagctctttatgactctttagtccatagagcctatatagatagacgctatcagactatgtttatgactttgtcattagaatctcttttgtgccaaattcaacttaagagttgttgtgattcctgagctggcctgtacacttatttttaaacggggaacctagcatcaaatctaaagtctaccctccaaagcttttatatcctgaacctatgtgcatgcacactttttgtttcccctcccccagcacgccccgggataataaaaatcagaggtctgacaaaggaggagagctctcaggacatgctcctccataacggtcttgcaatttccagtgcgagctggagcagtgcgatgtggtgtgtggttggaaaagcagtttgttctctgctaatgacagctgtggatactgaaatgaagcacagcaggtgggacagcggtactcaattttcaaaatctgtgccctaaaatgtgtttgcttaaaccttgtctcaccaccctttaggggcctccacatccatcaaaaccagaccccaggaaaggaattcaggcttctatttctcactagcgctttcacaatcgctgctatgattcagaggttgtctggaaagttcagtagccaaaagttccctccttcttcctagagtgataaattaaatcacttccagttcccagggtgggtggaggggggactggccttgcctaggtagccacaataactttgaaaaggacatacaattcctcacaagcatgagttaacagcattatgttgtaaggaattcattttctcaaaataatacatgggtaaggtgttaataatgccattggctgtttctgaaagccatggatgaggaaagaaaagtttgcattttctgcgtgttggaagattttaagcttttcaggtgtagtgcgttacactaaattcttacattgactttttatataacgtgtgcttactggagaactaccgctttccccttctaaggtgaatgtggatgcatggtgtaggtttgtagagtgttattaagatatttagaaagttgcaaggcaaaacgtaccccctcaggcaaatgactgatgctttatgtgttcttctttaccaacatgttgaatgatcttttttcctttatgtttttcagtggtcacttaggcataggtagagggggttaatgagctttcagctcttacctgagcaatttcttaggtgggtacctccagtaattctgagagtgcttgtgttgttttaagctggtgttgagtggataatttaccagaaactcctagtttcatagttcttttactttttgaatgttatttttcttcaagaagaaagttttcagcacagcgttcaggtgccttgtgttgggggaaatcctctgagagcaagatctcccaagggagatgcagatggcacagttgtgaattcaacagactttgcagaaacgcatcagactcttcaaatccaaatgcattatctttccatgtaattcaatcacctgttattttatggctctgtttgatttgattaaaacctcagcaaccaaatcatttgtattatacattatacaacttcctatttttatttccatcacttttgatccctttcggcaggtttcaccagacaattcaattatgaactgttttagaaaaattacaatttaatcaataaagagaaagggccaaatttctaaacaagatcgaaggatataaaacagcacaaaaattacctttatttcaaaaggtacatttggtgacatttttggcatgtggccgcgctgttgtatcctctttggtggttagatagatgacagccactagtttcttgtgaattaaaagaatgtgatagataaagacttaattaaaataaacagaatcctgctcactggtaggcagtgaactctgccaagaattttatgggaaataaatgaagctcctgaacttaagaagggacaaagaatggaagtatgtgctttggtagcaagactacttgtccttgtatagaaagaatgaattttttttccatgggacatttactatgatagcaggtatttttggttttgtagcattctacttcagtgtggctcaaacattagcatgcatcagaatcaccttggaggccttgtttaaactccattgctgaatcttacttggagaaattctgattcctttaggtctaggatgtggctagtcaagcttccagcttctgctgctggtccacacagcatgggttgagtagcaccactctatataggaaccaattttgaacagtcttgcacttttttattagcttgtccattgccatggtgacagaaagaatgcctctgccatagatgaacagcacaagcttaaagaaaaactagactgaatcttttttcctatgttaatttgcgtttgttcatagcatttttaatatcatactaatttttaatcttggatccaagctagttggctcagtgtgtttgtaaatacttctccacatcaaatttgtagaacatctttttttttcgcccattgaggtcagcatagtctgtgacatggcatgttgttttcctgccaactcacagaagtgaagaaatccattcaacacccgagaaaagttttgtaggactttacagtgttccctgctttgatctgaaacaagaagaagctgacattagtcacgtattttactttagacagctacttccagatttgtcagatcaaaatatcttataaatgactcaaatgttataacaaatggttcaaacctcatggcatttgtggaaaacaatttaatggggtccctgagcagctacaggataaagaaatttgagttatgaactctagcagcattttgatgtggggtttgcattctggtgtgcctctgtgtgtactaagtatttctctctttgtagaacttctggtttcttctgtggcaaggtcagaaacaaacatgcctgcattttccatagcctctgtggcttggcaaggaatttatttctcgtagatgtggaactctctatgtagatataaagatggaaccaaccttaaagaacatctgatttagacttcttattttacagatgagagaaaaaatacacttcagtgacttttatatcactgtatatttttaaagtgccatttctaaatttagaaggttttgaaaattaatttcaaggtaggttcttatgaaaaggaagttagttggtaacccccaatgtgtttgcaattttgatgctctttctccagcaataagaagttttacctcgaattcagtggatgaaaagccaatatccttagcataactgtttttgtcattggtggatgacagaactttaaaaaggagacgttaggaccgttcactcattgacagaagggttgtggggcacctagccatgtagtgcctagactaggtaagtatttttgtcatgtggtttaacatgaagttgacaaaaattttttcattccaatactcatgagctaaggtcacagacagtggattgatcagattctaatgaacatatatattctagtgaacactgtacacatagttatctgtagtactcttcttggtaacaaattagaattctgttataagactgtcacactaacaccaccacaataataaaagtgatgatttattaagtccttatgtgtcaggcactttgctaagcaccttgtatgatttgttgtctattaattgtcacagccagcctttgagtacagtaggtattggttccataattatataatgttaataagtactgttattatttccatcctgtaaaaatagagctgcaccttagggaggtcaagtaacttgcccaagttcacacagctacgaagtggtaaagccaggatttaaagccaggtctttccatcattccaatctattaaactctgccaccttccaagggagtaagaaggattatgttctcatgaatgaagagtttaatacaaattcaagctgaatgggcaagtgtttttttccttcttgactcctatgatttgctgcagagtttttttgacaaagaaaaagctcacgctctggatttgtggggacttgttataaaaagtcactctttttactagccgcgatgaatgtattttttccccatgggggagaaaggtttgagaggggtgaggtggttagaagaagttggaggagaagacttgcatgcccaggcttgctaaaaagcatgtaccccaggcgcaagagtaattgtttaataattcttcctcctaatatattcatatccaccgggggccagtttgagagatgattaggtcacaagtgaaatgagtttggtggtctcagcataatcccccttggacatgagttcactcacacaattgcagtacaattttgtccatgtctgcattattgtctgcttcaactcaggagatgctcagaattgaattaacaaggggctccgggtcagtctgaaggtgtgcagaggcaacccatggtataaggaatagtgccttgtcaacggagttgcacatagacagggcagcttgtcccacacctctttgtctctaaatccaacctcctatccctctcaagtagataaacagtgtacactctaagtttccagcctctcaccaagtgaggttatctgagtcacagataagggccatccagttattcctgctttgcacttagactgatttggatatataacctttaccaagacgattgtgatgcccaaattggttgcgttgcttcccttggtgaatattcttctcctaaaaaggcataagtaagttgatgaggaagcaaaatctcctgagaagttaaaaataatttaatcttatctaatctcgtcaagaaggttccacaaaatttaacaaattgaatttgaaattagaacatgaaagaaagaaattatatcatgaaataaaactctgtcaaataactaaaagatcgtactgtaccttatcctaaacacttgctactctgtcataaaaacctttaagattgaactgacatacctgtgattatttcattatatgattattataaactactggataaattacccattaaagtcatttttaatccaattaaaatcatgacagttctagttgactcaattcagtctcctaaatcatctgtagaaaatactgtagaataaattaagtgcccaacagttaatgtccttttgcacagtattttagaatcatagatgtttgggactaaaagggacttcgtatttagtctaaccccattttatatggaagaaactgaggcacagagattatgacttgcccaatgttacacagcgaatctgtgaccagaatccaggtgtcttcatttttagtttagttctggctctgtcgagccaattattctcatattttttcagctgtaacatgcatgtgtgtgcacacacaaacacatagcatggctacttccacactcacttcatacccctaggttatattcagggatacctacaattcccagcattccagttacaacttcatctcccttctcattccactcaagaaaatacatggaataagaatgagtaagagtggcattatcatgagggttattttgaatgggcatatttacattcataaatatatatgcatgtatatatagaaaatcattcccatacttgctactaaaacacttattaatggcagttattaatgagacttctcttagaccaagggtttatgacctgtaactcccaccagccaaatctggcctgctgcctgttttgcaaataaagtttcattgaaactcagccatacccatttgtgtaagtattgtctgtgccgctttcactctacaacagcagagttgtgaagctggacagagcatatcgcccacgaatcctaaaatattcactatctggtcctttacaggaaaaggttgctgatccctgcattagacaattcttccaactcacggaatacagtcatactttttgcattactctgttgttcttaaccactcaacagcactggacaccactgcttgtaagccccttctagaaacttttccagaatttattgctcttcatggatcttgtccctcttaacacctttacgatctcttttcctctttctgcttttaaacaactttgtactttattcacatgtccccaaagactggtatagcatgttaagaacattattgtttagtaaccgacatggatgcattactgcatgctaaacacaaagaaaattgaataacaatggtagctaagccctatttaacactttctatgaggtaagatagaacacgtccgcacacatgcacatacatgcacacactcttaaccctcatagcatctctgctaagtatactaaataggtatttataaagcccattttacagatgagtaaactaaattaagcacctttgcctaaggttacacagctaatcatagcagtcagtgggaaagctagaatttgacacaagtcttttatctccagagcctctgtgttttactttcctctggtactaaacttaagatcataaagtgagatagagaattagaaaatctttcaggtaaatacttcctctttcctttcaaggaggggtttcaagggaggcttttagatttaaaaagggagcattctttacttgcttagtctgttttcattcttctaccacttgtaaatacaagtttttctgttccctcctcatcttcctgatgaaattacatactgtggaatagatcgtagctacgtgattctttcccctagtacgaggaaaatataactaagtgtagagagtggagaaccagagtcagactatctagcttcagatcccagcttgaccatctaatagctgcatgccctagggcaagttctataacctctctgaccctcagttccttatcctgaaagtggggctgatgataataagcacctcattggagttactgtgcatattaaatctgtatctatgcaaagccctttaagtggatcttaggacctggtgagctctcaataatattatgtaaaaattgcgatggtggtcgtgataatgatggtgatgatgatgatgatgaagataagaattctcataaagcattcctatggagtcttaccaattgccctgccctgcctggcctttggagttttatcatggggactgcataggtaaagtggccaatggctgggggaagaaatttctcccttctctaaactcatccctctgcattctgtatctagatcttggtctcccagcatgggattagtttacgatctactgaggcagatgaacaggctgtatataaaggaagtagcaaataaatattaaacagttctgacatggttgatggaggaaatgctgtggcttcttggattaggtattcactattggcatcctatattcactgaaaacccccagtggttttgacagagtaaacaaacacactaatgttcatgatactggccaacttctaaatcaggtgattgtagttcgcttatcttagttggatttccggtgggttcttctctgcttgtcctaaagcacgggtcatcaacctctggcaaacaggctcagttcaattgctcagacatttcctgaagtctacaccctattcaccaaaaaactgtcgaaatgtcatgacatacattacatttacatggtgctctacagtttacaacatggctttcatttgagttatgtcattagatctttgcaacatcctggagttatagaatctaggagtttgagggaattgcctgacaatatagcaatggagctgtagggggaaggagtttctcatgggtgtattgctgttttatgcttcaggtcctttgcttaggctgtttcttctcccacacctgtaaagcttctctctaaaggttcaactcaggcatcattttatttaggaaaagttctgacagcctcttggtcctgtccttttagctcctcactccttctttgtgctttcgtcatgccccgcagcacctagggctcaggtctcttagcacatttaccatattaaatcaccgttacatacttacatatttgcccatctagttcccgcccccaggccttactgtgagcacctgttactcagagaagctgtttattttccattgaccttttcatttctagcatatagcacagcacctggcatgcaataggtgctcagtaaatgagtaacatattgaacaaatctgattccaaatcctcggctctccccagcaccctccctgaaccaatataggtgccctcctgccagacccaagcagcttccgaacatccaccacgtaccagagactacaaggtaaaaccagatgaaacaattcttgactgacagcaaaagatgatatgactaacttgaagagtaataaatgaaatggctgaagaatgctttcatgctatgacatatcaaataccaattaagttcactgtatattcagtacaagcatgctaagaggatgcaggtagctcaggcagcgggggagccttgttgagatgggagattttgagatgggttgctcataaattgatgcagaggccctggaggtaaacagctagaggagaggtaactcatggtgggggtgggagagataggagtcagttcctctagttggatggcaaggtaaggaggattttcaatttcagggtgaataattgaatctgataatagaaatggagctgcttgtgtaagtgtgcatcaagataacccttgagcctgacttaccctcattgttccattcctttgagatcaaccaagagttccaactccaagagaaaaaggcaaagagagctgtctgctttattgcaatgcctcatcactctgcaatatatctgttctctctttctactcacaccaacataaacagacatcaaggattttttttttttttttttggcatgttaccatgcctttgcaaaaaatgaaatttccttgacctggaatacatcctccttcctccaccctttcatctcactagttaactcctacatattagtcagggctcaagtcaagtctctgaccagcctcaccctaacagagttgggggcctctctttagtgttccccaaatacttctccttcttagaacaatcagttaaggattgaacagttgtccatgcactctaccacagtggaatcaacaggagggtaggagctatattgtggtcttatttgttattttcagggtctagccaatagtagactcttgataaacatttttaataaataaaggaatgaatgagtaaattaatgactaagtgaataaatcccttatatcctcttggtcccaacctggtagactttctgactccctacctataccactcttgtacctatttgttacacacaaccctctatacaagtgacattgaccacagacaaaagaatgtagagaacagagtttaagcagctcacagttacagtttctagttactcagctctcttagctcagatttaccagtttcaactgtttcgctggcatcctttgattttaccctccttttgtgcgagtttcccttttgatccttctcatcaaacttctcagtatcctagtctgccatctcagaactcccaagccctccctgagctttgtctgattgtttcctactcttctcgtgcccagcttcccctctgcttccctcttacttttcctgggactctgcttatgctctcattacactcaaacattagttgcctgccttccagagatctaggaagtaattccaagtctcgccagcttcccctgatgtcattcatgggtagaacaggagaagaagctagcatgggatttgaagtcagagccatctgggtgccaaatcagggtttgctgcgtattatttgtgtaacgtgggacagattaattctccaaacctcggtctgcgcatatgtaaagtggaaataacagtacagatacatggcttgtaaagttattggcagattaagtgagatgtaaggtacttgaaatatacgtacctggcaagttgattaggatggcttcttatcacatcttcctcacaaatacaacacacgttcacattcctagtcattcctttaagcagaccgtacattttaaaataacaaacacccacatttgtgtttgaacccagataatactaatttttctccactgagagacccaaggtgccttccctgagctgcacagatacctccttgggaggtacgttaggggcccagcagatcccatctcagaatctcaccctaccttggtgtgtccagactgtcggggagaatatggagtgagaggtgaggcccagccagatctgaagcctcacccccacccatcatctatcctcctggcatctttcccctgcttctggtttaattagttgttggattgatctgctgaacccagaggggttctagagcagttgctttattccatcttcagctagcagaagttttgaaggatattgggtcggggtgaagctctgagctaccacagtacaaaaagtcgcttccccttgccctcaagaaggagtgagtgtttctccgggttatatagtttctgtgcctcagaggaggctacgtttcagtggtgtgtggggtgacccttatgtattgtttatatcaagaaagcgctttgagacgaaatagggtctattaatctcagatgttgtgtgtgcctctttgctgtctgagtttggttgttttgtttcatctgctgagggaggtttgttttcttttttttaaatctgagatgaaataagaacaccacatttactgtgatttatctgggggaagaaaaaaagtgaaactggaaatgtttgtccttaggagatttgtataaagttctgtcagatgatgttgagaatgaaatgggcaggagagatggagaagcaataaaagtgccgttttgagtttgtgaatggaatcaaatttcaattatgacaacagttaaacacagtgatttttctgtattttcaggaataaaaacaacacaattatttcttttgcagtgcccagtaatctctaataatttatccgttttcatttaatgcctctaaaatgggcaaggagaattatacacagcctgcaacctgtaataaaatggtcagtttcaacacagctgttgagtgggaggcaaggcgaggaccgctgtgcagagaggtgctggtactgtacgcattaatcaataagcaaacgctgaatgctgctagatagtcatttacccttgacaaaacaagcaatgataatcggatgataatgtggtaatttacctttatacattttacccttgttggatttttagaggtcattgttgtatctgataaattttagggtagaattccagctttttcctgtgcaagaccaatatctgaagcttgtgccttttgctgctttttccttcaaataacaggatcttatgaattagtgctttcattatatttgtgtctattaagtcagactacagttttcaaggtgcttttctattctagggagatctgcagggcacttaacctacattagacctaagaggtctgagggttcttcagaagacaaagaatttctagatactttccttgaggaggtgtcaagggcaatacagacaaaagactgatgtctcctttaacagcttgataagtatctcaggatattctgcaggaatcagttctgtttctacaaagtcctgtattcccattcagcatgatatggctgaatatgtgtgtgctacgtgtgacaatggtgaagacttatctttgccctgagggctgagtgctataacactgctcaagcgataggcttgatagaagtgatgatttggagagatgatctgctttaaaaaaaaaaaaaaaaaaaggcacattagagatgtgtaagaattaaaaatgtgactctctgtttatctggattttattttataagttccaaaggcatttctattcgtagcatcgaaatcccttgtaaaagtaaagtgaatcattcttgtattgaccatttttttcatgttgttctattgagacatcttcccaactgagtttcttattgaattgtatttctataagggtattgtaggttagcagcacatttttatggtacacaaaagatgtgccttctgaatttccaatgccttgcatattgttccccacagaagaaacatctcggaaatgctaaataaatcaaaacagaaacatttggctcttgacttgccgccggagcttttcttttcctctcagtttacattggctggaatatccattatgatccatcttacctatttgattaatttgtaataaatctagccctttggaagcctcttgctgcatttctggacgggttactcttgtagaaggtttatttaatatgtgtctctgtgtacctatatgaatgaaaatttaatatggtttagaagcctttaaaaacacacacgcacatagtgtttgctctgaattaagtgctcatatttgacatagctttgcggtaaaaatccataaacgtataggcagacaaaattgtttagaggacagtttcttcagaaattcacgtgacacgtgatatcatttcaggggatgaaatatcatatttcatatgaccagtaaatgtaattataaatactagattggaatccttatttttgtgtttttttaaaaacttcttctccttatggcctatattatttgaagtgccaccgccacattgcagagttcaccttcaatttgatgcagtgatgtagttgtatccctgtgggtgagaaatgttcctctccaaataactgtagcagcatagcaggaatattttgagtcaaccttctctatattatagcaagataataaaaacgcctctactcttaaccatcaccatgtactgaggaaggcataacaaattcattttctgatgttggaaataagatcaaggtgggaaacaatacccccatttttcggacaaagacattggggaccggaaaaccacatttaagactgtgttaattgtcttttatagcaaaaataatgagaaaaataatattagccatttttatggtatatatcccaccctactcctttggttatatgtattaccaccatgtacactaagaaagccaaggaaaatagttatcttacacatatgttttgtgcttgctgaggtaaacgatgagtgaatggtgcttgcggtgtggagaaaataaagagaggttaattggtacatacttgcctcatattccttatctgaatgttttacattcatatataatatggaactgtgtaatatgtgtgtttactaattacgtctgatgtctgtcttaactttgtcactctcagaatatccttataggcatgcaccatgtgtcaactgaattacacccatagtctgagccacacactcttctcagcactctaagatagttagacaaatactgtctactcaggggaattataatccagtagaagaaattaaacaaatacaacaaaaagtaagttaaggcaaactaaagtacattgggataggtactgtacttcagtgattcagaggaggaagcacgttcctattcagcttcagaaatgcttcaggaatgagctggactggtttgatagaaagagaaaacagcatgactcaaggcacagggaccaaacatcttaggaatagttatctgacatcattattactgtagagaaaggagaaaccttggatactataaaaagacactggcccaggcaaggttgcagtgagctgagatcatgccactgcgctccagcctgggcaacagagcgagactctgtctcaaaaaaaaaaaaaaaaaaaaaagatcctgggccaggcatggtggctcatgcctgtaatcccagcactttgggaggctgaggcagatggatcacctgaggtcaggagttcgaaattagcctggccaacatggtgaaacctcgtctccactaaaaatacaaaaagataaaaattaaaaaaaatagccgggcgtggtggcaggcacctgtaatcccacctattctggaggctgaggcaagagaatggcttgaacccaagttgcagaggttgcagtgagctgagattgtgccactgcactccagcctgggcgacagagcaagactttgtctcaagaaaaaaaagaccctggctaaggagagtccagcaaaataaatccctgctacaaagaaccagatcagtgcctgccatcgatccatgatggacctcccttatatgtgtggggccacaacacacctacgccttgagacaagagaaaggttatggaggcccttgagtgtcaggtaacggatgctattgtgtccccataaagcagatcctagtgctaggcatataatagccaaaaataactataactatctttaatcaaatacctactctgattcagatggactttggggaaatttttttaggttatcttttcatattttgctccttcttatccattaggtctcagcttaaatgtcacctcctcagaaagactgtcttgacaacactgctgaaagtactgccctctctaaaagtcctccttaccctctacaactgcatcctgttcctttccttcataatacttaagtcttaactgcatatgtatttgtctgtaaatttgttattctttttcttcctgctatactatcggatttttaagaacaggaactagagctgttttattcaccaccctatcccagcaccttcaaaaagtccctctctatagcagacactcaaaaattggtcaaatggtgatattcacaacaacctaataaagtagataccattatcttaatttttacaaaagaggaaattggcattcacagaatgacttgctccagttaatcaataatctgccaaacccagattcaaacccagtctacatgatcttaaagcttatggttgtatctttgctagatgataaccttcctctaatagaaagatgaaatctgtattagtctgccagggctgccatgacaaagtatcacaaactggttggcttacacaacagaaatgtgttgtctcagaattctgtaggctagaagtgtgagattaaggtgctggcagggttggttccttctgagggatgtgagggaggctctgttccagacctctgtcccagcttccggtggtttgctgatcatctttggtggaccatcgcttgtagatacatcattccgatctctgcctccatcttcatgtgtcattcaccgtgtgtgtccaaatgtcttctttttatatagaaacagtcacataggattatggcccaaactaataaccccatcttaacttcatcatctgcaccacttctatttccaaataaggtcatatctgagttaatgggggttagtactttaacatatgaatttgggagagaacacaattcaacccataatagtacatttttagcaaatgactgactaatctcaaggcatagtaattggttttgtgttaaatgtactattcataatgtagaaaaatgttctaaaaaaggggataagtatcctagttttatcctaacattaaacttaaagagccattcagtcatcttttctagaagatcatgagaatctcaaagattatgtgatcagggactcagaacttggatgttttataattttgcatcttagcatggaaacaaaatcagaagttaggcaagtaagcatgatatttgaaatcactttgccatataattactgctagattagattgggatggacctgacttcattcttctgtcttcagaactttagataaagagtattttttagcaagcattggaaattctcagtaataatgcccttgcaatcagaaggtagaagtttagtattatttcaagttagttcttaccacctatagtgtcagagcacagtgctaggctctagagaaaaggtacaatttcaggatgattcatttatttctgtgaattttttcctatatgctgtgtctttgagtcactgaaagaatttactctatcatatttgtgacccactgagacctagggatgggcatctttatccagaagggagaagctttgagaagtcttcaagttgtaggacacataaaacctattaatggggagaagttgtttctgaaatgttgaaccaaattattggccactaacacataaacatgcctaagtttggaatgtgacatgggaggtagggtctgatcaggaaccgggaaacgtctgttttcttctttggctatctgacaaagataactaatagaaggagaaatgtgagattacgaaagaggaaatggggaaataaaccatgacaaaaataaatgagaagagacagataaaacagaaagaaaggtaagttaggggaaaaaataaaaggaaaacacaggtgaaatgaaaacagagatttcagcaacctagaaaagatttaaaaggagtgaaataatcatcagtgaatggcaaacaatttgacgtaattttccatgttgttttcctaccggtattccagccttagaacttaccgggagtacctggaatgcatttcctcactcatgacctttcataactctcagaaatgattttctttcactctacttcagctggacttgaaagtgcttgatggtcttgggaaggaattaccagtaaataataaactcacagtatactgaagtcacatatagttttttaaaacctgggaaatgtttctccattttcctataaaatcccctttaccttttataggctctccagccatttgtttgtttttaataaaggaaaaacctattggacaaatttttgaatgttgttgaaacagggcatgactatcactccagtaaagaatatcccatgtaaaagaggtttcagtatgtatactgggctcttacaggctgattctgtaaaataatgaaggaagccactggtgaattaaacagcttgttagtcatgggggatcagtgaatagggtcctcctggggttcaatatatggagaagtggcaacgagatcaggggaaaaaatcaaactagtagttactgaatatatattaaggtatcctgcaaatgcaatataggaaatagcttcatttcagaagctcagtaatttagtacctctcacctaagggagtcaggtcagaatttagcctcggcagagccaggcaaattgttcaggatgaagacagcagccaaagcggcacatcattaaggccaggcagtaggagggttgcccagcccttcagacctcactgtgttaatgaagttacttcattgacataacctaatattcattcatttctgttatgagaacaaggtcctttcaaaacttctcttcattcaatgagtgttcagcacctactatgtaaagactctgtaaggaggaatagatggcatccttgtccttaggaagctggcagaacccccattccttgaataccagtattcagtgtagcaaatgcctgtctggctatatgtggagaaggaggaggttgattggccacctccaatggctaccagtgctagacagcattccttcttccccatttatgattttccccttccttatccactctccgtcttccctagtagctgggacaaatactgagggcatgagcccttgtcaggggtgctccgaagtgagcagggcatggaaatgaatcttcctagccctatcctgtaccctgtaaccacttaccttgtgatgtcgtttacagcaagagcccacatccagggttattgtcataggaagaaattgttgcccagaacaactgtacaatttgcatgttggtgcctcaattctgtctaatagatatgcctgtaacaaaataagatgttatctctgtttctcagagatgtagtcatttcactcagagttctcatatgacttcctttggagaaagtgccgtttctttctgtgtatgattttatgtgcacgtacacaaatgcacacccgttatgagttactgatactggaaagatttgagtaagtgtgtggagataataaatgcatggtcacatctcatgtgaaaatcaggatttatatatgaagtattaatagaaagaatggatcccgcagaaatctgctttcccactggttgattaactggtttccaagaattaggtaaagaggacaaaggagaacttgtgtttgaaatgtgagaatcctgtttcctagtgggcaagtgctgggggcttccttttgaacaacgctgggttttaagggactttcagatattgcatcctgatctccctgccagagggtggcaaaaatttggagcaatggctgtttcaacagaaggaacacattccttccatttcaacacaaggaatccaggaatcttcatcttgtcctaagtatacaggaagctaatgtcctggacctaaaacctgccacacctttttatcagtaaaccatatattaatttctgtgttctctaaattctcttccatagaattattttccccttcaagagaaaaaattcatcctataggtgaagcgtttattcttcacactattcctgcaaagtaagagattatcctgattatcttttattgtgtgtgtggaaggaggggtgaagaaggaatagagactccacgagtttaatgtgcccaccccactgatatttcagccaggtctgcctgacctcaaagcctaagctttgctaccaagctgcacattcatgcagtattcacttattcacttggtgagccactgctatgtgagaagcctcatgccatgctctggggacaaaaggaagaagaagacagcatctctgcctgaagggcgctcacaatctagtgggaaatatggaaatattaataaataattctgcagaaggtgataaatgcaacaatagactatgatcaagtgaagacataacaaagaggagggagtggtcgtcctaatgtgtctgcagatttggaggatgccaagtggaaaactctcttttttctaagtaagccttctgagaaatccttcatgcttttgtcagcaaatatgcatctaacccaagcctcttcccagcgcctgcttaaccaggctgcgaaaaagttgcatttacccagtggaccagcaagggaggtagtaggtgacagcgtcagtgagtcctataacaaagtaatgaacaacttccacagaccagagcagggattgatgtcacagaaaacttaggaagattcttaacttctaatataacaacagcaactgataattattgagtgtcacatgccttaaggaatagcggtcacgtgtcacatcatttaattctcacagcagccttgtgaagggtcccaaagaatctgaggacctgagcaactcaataatgtttcttttagtttttcgaggtcatatagttgatgtgaggcatcctaaattcaaacccagagctgtctgacttcaaatttctccctctatccagtctccccaaatcttgacttagaacaacacagctaaacaaggtaaaatatgactaatgcttggggtaaatgttctttcgaagggatggaggacttaggaggtctctcagtagccatggttcatccttttttgctctggccaccacactgtagagtcatgacagtcctgtgctagtattaagaaaattacacttttctcaaggtagcttagtttactcaaggcactttgtgtgtcttaacagtttcccaacttctcttatcttccctaggaagaaaactaaagatgccatcagggtgcttaactagtctatatttattgagagcatgcctcaggggtattttagacaaaataacctcgtaacagtggatttttcctgagcagaatctaggttaagaagctttgcaggctagtctgtatagactgatattaacttttccattaagtagggcagactgaattactgtttcagaatttgatgatggatgaagaagcaatgcaaaagtgacaccatcctatatttgtagtggtgacattatcaatccatttcctttgtgttgttaaagtaatgggcatcctaaagagacaagaaatattttttttcttttatgtatgtatgtatgttttttttcttaagcatgttggctgtgaagagaatccgaaggaagctgtcatcaaaactgagttctaagctcagaaaagtgaccaccgtgaacatccccagaaaagtggtctagtacagaaaacaaagaccatgtcaactctatgaagtttcagcttctgaacaacagacagaaaggcaccgtttcacttgggaataaaatatgattccattgtcttaggaattaccaagcggcagcatgttctattaacatattttactaatatgaaagttgcaactcaaagttcaaaaactatgtgttgaacaacagattccagggatgcgccaggcatctgtcccattcggtgaacaggccttggaacagatgtctcgaatgtcttcaaatccagacatgctgtccaattttttttagtgataaacatactttctttcctttttgtcaccgctcaccaaagtattatatttaatgcataaaatatgtaaattcttaaaccatcattttgctctttagtgagtttagatattacaaaacggtttaattataaaaacagacagacctagtcctgggacctgtgcagctagaaataaatgtgcaatcaaaactgcaattacctgcagaatttagtgtaaacagatcagcaatcacataacaaacacaggctagtttgcattctgatatgaatacagttagatccaaagcaattttcctttatttatcttagctgctcagcataaataaagcaagggcattgaagcaattagcataattagagtatcgtggtcaggccctgtgtgatttcaagagacgtttcactttagaattctttttcccacacaagagtttccctgagccactaaaatatcgctttgggcatttttgtatttcaaatttgcaagttgtcagtttgaaaaacccttgacacatggatgtgaaagcatctcatagacagccacagaaggtataccctcagcttttcattactaagaagcaggggaatttcctttttcagctctttctcctacttgacgtttaaccctagaaatgtcagtcttaattatttccattgccttcaaactgggtccaagggttaaagacaacttgttcctcccaaaaataaataaaaataggggatgggagggtgggaaaaggagaggttatttcatggtggtagctgagctgttgctaaaaaatcgaaggctctggcaaccagcttgctactggtgatcagactttcagtagctccaaataataaggtagagatcagagtggggtgaggaactgcacatggtttcctcgcaggatgctctgcaagtatgggaaatattctctgtatgggtaaacagtaagcagtagatgaagataaaattggtccggtgaaaacacacagaagaagaggttttgttttgttctgttttgttcttttatgtgtttgaagatgtctgagaagactatcttttggttggaaggtccaaggtcagccccttggaccattatataggtaccagaactcatacagtccagtcaaaggaagtgtgggtcttaaaataggctgtactttcctttaaaaatgatttttaaaacatacagtaaaattgaccctgtctgcaattttataaattttaacgtgtttaaattaatgtaaccacccatcacaatctacatacagaaaagtgccataattccaaagacctcctttgtgccgtcactttgtatcacccttaccccaacccctgatggccactgatttgttctccttccttataattgtatctttatgagaacgtcatataaatggaatgatacagtatgtaagctttcaagactggcttctttcactcagcgtaatgcacttgagactcatatcggtaattcctttttattgctgagtggtatgcctatgtacagctgtaccacagtttttctgttcaaccattgaaggacatttgggttgattcaatattttggcaccgatgagcagagttgttataaatatttgtgcacagatttttgtgtgaacatagacttacatttccctagggtaaatacctaggagtagggcttctgcattacgtggtgtgtgtgtgtatatttaactttctaagaaactgctttaagtgttttccagaggggctgtaccattttgcgttcccatcaagtgttattctgcactgttgtcagcacttaggattgtcagccttctgtttttaatcttagccattctgataggtgtgtgctggtatctcatcgtgactttaatttgcattttgcaaatggctagtgatcttctactgtgcttacttgccatttgtgcgtccttttgaatcaagtcttgtctgcctcagtctcatgcttactttaattgggctgtttgctgcattcagtcttaatttatctgtgcaaatgttaggaaatctcaactatgtatccaggtctcaattatctttgctaatgcaggcccattcagaaactcagtggtggccaatataaattatgagtgaaattcagctcacaccaaacaatccaggctaaaaggactaataaaaaggaaaatcacattacagtaaatcaactccattactgagcttctgatctttccgtcctttttaaagttcaattcttttttaaataaaattccaagtccagtctcagtttttcctttctttggtctctgtcgagcttttgccccagctgtagccaacatttactattaattagagattaaatattctttctttctgggaaaaggtacaacctctttggggttctcttcagcagctctgggatggggcagacactatgctgagtgatttacctgagtcacttcacttcatcctgtgaggacaggtgttagctgtatttcctaaattaaaaaacccagagaaacagatgatttgtccaagctcatagggctcataaatggctcaacctaggatttgaacccagacctccctgactctggaagttctctctttctgtgcagctgcttagtaaccagaaatctaagatgaatgaagtgattgcatataagctgtaagtcgctattatccacagccctgggaataatatgtaaaaagtaggcgttgttctctcccttccctttgaaaattcctttcctgttgtgtagtaaatgaccgcttcctaaaaacagtagtaagataaggtctcattctgcttcaggaaaggaagcagtagcctttccctgtctaagttgactcccaaattttgttggttcattgtcctagaaaaccatgcttacactttaaagtgagctttcaaaaatgatactgagttattttaaaactgagattgcacaaagggagagttgttttcaaacagaacctcagaaatgctctaaacagcattccttaattctttaactcaagagttaaagaactaagcataataaacataactgtaaacagtggaaataatagaagagaacctttttattttctcatggtggagaagagcttcttatgaaaagaaattcaggtattataaaagactggcagagatgattactttagaatttttaactatgtacaacaaaagataccgtaaataaaattaaaagataaattgcagacttacagaaaatattacatcgtataaggcaaaggataaataaccaaactatataaagagatccaaaaattcaacaagaagacaaacatgccattagaacatggtcaaaagatacgaatggaaatgtcaccaaagaaatagaaatgaccaaacaatacatgaaaagactttaaattaacagcagtgacagatgcttttgcttcacagattggccaagttcgaaaagactgatggcatcaaatattggtgagaatgttgagaaactgacattcctgtttgctattgatgagaatgcatagttctgatattgaaaacaatttggcaaaaagagcaatttctcagtattattagaagggatcaagtaattcatttttaaaaaacactacactaaataaatcttaaagtgaatccattgtggcattgcttctaattgcctcaaattttgaaaccatgctccatagaggaatggttaaatttattatgaaataccatactatttacaaaaaagaaaatcacacctgtatgtggtgacgtgaaaagagatccgaaatgtattgtgagaatttttttaaggttacagaatttacatatatgttacacatcatatatacatacacatgtatatatacatatcacatgtcatatacacatgtatatataaatgtatatgacaaatatttaaatatatgacaagtgaacaggtatttccctgatattctgccccatatattaatgtgtttatgctttaaaaaataatactctttaccttaaaaatgttaccaaatctttttgtcattttattcagttagctagacatcatgacaagagtatttgtttatttcattttattcagtgtcataatctaatatataatctacagggagaatttacagccgcctgctgactattattggccagtgtaaccaaattaataagaagacttgcaaatttctgctatgtgtggtacttactatttcacagagcagtaaaaaaaaaaaaaaaaaactccttatgtcagtactatttctatgtatgaaccatggcatgctgaaagtgtcagacaaagcaacagctagagaagtggttaacactaactccagaatgggcctgatttgtatactctcttggatcccatcctgaaaatgataaaactgtgtatttctttacattgggagtcaggatttgttggccaaatcccttgaatgacatagttgctaggagctggatactatagaaacacgtgaggaagtcaggagtgtgactacaatatggttttcagtggacaagtattttcaagtcatagaaatggcttcttacctgtcattttccatttgagaagtccacaatagtatgtagtgagaaagtgtctgctacctcctatatatgtatagttggaatcttttgtgaatttcttcttcatacaacctccatgtgtggttatttaatcgcattttttctatgaacctcgtacatcttatttctctctgaaaataaatagaaaggggtctgaagtttccaccgtgaccacacagcgtgcactctgatgagactttggaatttcctggaatgtcagctctgtaacacactctaagcagtgactcttggggcacagtggaatgggggaatccctgctatgatcactcacagtgggaatggactgcctcggctcttgagaagtcctctttccaggacgtgtgctgtgtctgctttaaagccacaggacataatgctcatcataagaggaacatattagcaaggagcagtagcaatagaacttgctatttttctcagaggattcaatgaaagattttgaaaagaactaaaagtcaaagcaaaatgtttctctgactttatagagagatgctgtttgagcctttatcatagaacaagcaaaaccaagcgtagtatttactcaaattctataataaaagtatatatactgtcataaaaaatatcacttacacctttactaaaagaaatctggatggggacctcacagtaattttgaaatatcccttttcactatcattctagggcagtacccttaggcatatgactttctaaataggcgcaaaatgtatttgactagactagtatgaagtttagtataagaaacagtaaaatggacacttgagtaggactgctgttagaagaggcccagagcagatgcaaatgtggcaaaccttttggttgagtaacttctacaacagtctatagagtagaatcatgtagagtatgcctttttaaattgtgtatctataaactgtaggtttcaagagaacaccgactatctgcctagttcatcatcttcagagcctagtacctgggttagttcccaacacatagtagtggcccaataaatacctaatgaattaatcaattaacatgttcatcagaacattagtagaatgcatctctggattatggatgatttttttatatttctatttttgcttatttgtattttctgaatgttgttaatgaagacgaattactcttaaaatttcttaagccattttgccattattgaaaggtctttggaacctacttgaacttttatacttattagttttgttagtaaatattttattcacaaaaatctgcttgtgcagacatacagtttgagcctatttttctatcagcattgatggatttaaactgacccagccacgctctctgccctatccctctgtgactgagagtgctatatatgtttagaggccactggttagcatcaggaatactctctttggccatagaacagagtaaaaccgctggagagaggcctctggctcctgactttggcctcgtatgcaagttctctaaacagctgagctaacccctactagtgctaataagagtttgtaattagacctgaggtgaacagaactaagcgttcacctccagctccctaccgttccacagcaataatcaaacctgaagacatagagagagctgtttgattcataaatatgtaaagtggatagaatgatacatctctgttgaggttatgatatgaaattcttatttgtaattttttaaatcttcaatgatagatacaacaaaactacaattattatttgttaaaaaccatagtttaaaatgttattttaaaagatttttattttctatatggaatagggtaataatcataaacagtagaagaatagagtcataatttatgactgtgcagagtgctagattgtattttttcccaatgaaatgcagagatagaaaaatattatcatgatttgtgttataacactggagtcagaactaatacgaagaagtgtttcctcaacttgatgcatgggctttagctatgcagttcccatcagcactaatgggagattcaaggctaaaccaccaaggataaaagctagactataatgcaagatttggagatgttgcccatttgagaactggttttcattgttattttatgtgcttttttatgctttggaggttcctgctgttatgcttttaaaattctactttcagatatggtaaaaagataacctttcataataaatagaagatgtagccaagtttttctatgtttaccaataaaattatataacggattacaattccaactaaaacataggtccaaaggtttgactaagatattgctcaaataccttagtcaaattttctagacatttgaattttctagacatttcacacaatgtctagaaaattcagttacccatctctttgaaaaagaaattggtgtatgttttcctgacagtctattcaattactggtctacttttttcctgaaatattttcatacttcagcagtacagctatgttacgaaaaaacaacaaaatccctagaagttaatatatctgacaggaatggtaagtcaatatgatggtgtatatcttccccctccatgtagacaatgttcctggaaggaaaatttaatcttctgtggctaaaataaatgaacatttttgtcttctgcttaagatcaataaatgagtagattttgcctacattaatacttctgctctattttaattgttgtgtatttaactgatggcagcttccctaatttagggcacattagaatgtgccaaccaattcacttttgaggattaaaatgaaacaaatcagtgtttcactttgatatgctcaaacagaaaaaatctcctagggtggattattgttaatggtaaagtggtaagtggaggtttcaacacaggcataaacttttaattggccagttgtttgaaaatatggctagttcatagattaatggacgttaatcagaattgtagtttctttatattcaaaccaaagcctcttaatattaaatataccagtgagatcatcaaccttattttaaatgatcacactgcgagagccatcgtgagtggtgataatgatgctaaatgagcaaggtagttgagaaaaataagcatacagaatcattctctaacttctcaattatacccaacccctagagctccactgtgaaaccactggtgctgggagagtagggacccatttgacattggacgggaagagctgtgagctcgtgagtcactccagacacccatgccaaggagagtgctcttttgagaggcaagccactgcagagaagaggggagcctgggggcttaagggccttatggagcacagagcactgctcgccttgacgatctgagctagcatctggagtctcaagctggtcaccttgcctcagccaggtggttcatgtagcttttaattatcaacagagctttagtcttccctgcccataagctaagcatcgggttgtggtggcatagaccataaacctgtgcagaccactttacattggaacacgaattaatgaatatatgagtcccttttgtgtcattttggccaaccaaaaagaaactcttattgttatgtatgtaggtactgtcatgggtgttaactggttgtccttatcccattcagccccactttaaggaccctagatagtagacccatacaaggcttgtagctcaaaggtcctaaaggacccaatggttactggccactcccacacaataataccagaaaactaataatgctaaaccaaaagaaccttgagaagttccctctgctcagaagtatatggctagagtcagaccttcttctccctgctctgttgtgctgttagcacagcagcactgaaaccaaaacataataaaactccgatatccctgcattcagcagtttacaactctctttggaacagaagagtaaagtaattccttaagcagtttgtctcttacagtagtcagtcttggacagctgtcaacagaaaaaccccaagttatctaatattaaaatctgctgttgcaaaaagacttgtcacctaaaccttggcattaggacttatgagaattattattattaatattagatagcactgacaagtatttggaaaagatagggtaacctaggagagtggcatcccgtttctcctcaatactgcctttgaatttacttacataaaggcttgattaaaatgaaaagtttttgtttttcggtaagttgagaaagcagttcccctgtaatgcaaccttaagacagcacaagtactcataataattgtaagaccctacacttttttcttgaaaatctcatcaaaccttacccacccccaacattctataatttacaaatctgtcatagagtcacataagatgataggatttctgtgacaaagcatttgtgattttatctttattttatttgcttttgagttgtttactgttttccttatgcaggcaacctctcaagcatcatctagctgactcttattctttgtgtatcctgcggagggagggggaatcaatgaagctcgttgactctcagggggagaggtgagtgagggagaagaagattgtgtaggggaaggaaacgtttcctgtctcaacattgcggtgtgcatgggctgagccagatggaaacagagatgccaaccttgctgctctgctgggtctacttttcactgaaggaagagtatggctggaggcatagctagggaagtggagggcaggggttcagggcaggattttttcaatcaccactgaaattggagagatatgaacatgaactcttaagagggaggtgatgtggtctccaagaaggcaattaagtagacaagaagtgtgggaattagggatcaaaactgtacggcaaacaggttgagtggtcttagacaagttacatttaacctcagtgtctcattttctgtataccaagcagaggtagtgttagaattaattaatttcgcagggtgccttgggatccactgacgaaagactggagcagtatagaaggaagtttcatgttgctgttacggtactagaaaaagaaaagactctccatttactttctgcccatccccaagccccacgtcccacaaaaagaagtgaaagtaatgtgttggcttcatcacccaagtatccatgcacacttttctttcaaaccttgctttgaaaaccaatggcatgtttctattgttaacattctctgtgggcctgagctttcaataattttattctaaccctacagttagttcttaatattatgcaggctaataaggtcactgtttggggggtttgtctttgtttggttgcttgttttttaggatattcttctatcataacacttgtgtactaattcccctaaacttctttaaatttcctcaaacttgacctttgaacagagaaagtctgctgtttctgaggctgaccacgaatgcatcctcactctgccttcacctctctttatggttgctttctcttttttggcagaacagaaatttccaagttttgtgtgtttgcttacaaataaacgactcagctgtgtccgcatcctttgtgtcaatgtgaacattcccttgttctatgtttagcttgaataattaccaaactgtttgtaatgagaatgtgaggatgtgacctcacagcaattttttcatttcctttctctgtatttaatacatttcagaaactgaaaataccaaatctctgtgcttttttttctgatgcttatcagtaatggaaacattgcaaaacaatcagcccaatacctatgctttgttcatttattgccttctctgaagataaatggactgtactcaactctcttcagcatttttcttcacctagatattattgccttgtgcagccaccccaaggtgactgttatcacttaattaaatccttgcacgctgggaagaaaaaacaacattgttccttcataaccccaaggagcctatttttaagccactaagccttttccctgttttattaacttattcctggctacaacaagacatacttttgttgatgagcaaaaggttgtattagctttttattttctgggtaaacttatctattctctgggaatagggaaaaaaagaatgggcatgacaagagaagggggaaaaatggggtctcttcaacctccctcgttctagtaaaggtctctgtaaacactgagctggaaactagaagcaggggattcagggaagggaacgagaaaataaaatgtaaacataaaatgggaacaagactaaaagtaaaatgatgagactgtctattggggaaaacgtgacaggtagcggacaccactttcaagctaaagaaaccaggcgtggaagttgcattttttgaagagggattatctcctgacacctctttttgttgctggcttggactagcatctttttattaatctcttgtttaatgcgttttcccccccaagtcaggatttcttctttactttatggtattaggcatccatgatcaaccagttctatacccagttatgtttcaaggaatgaaagaactattgttggggtatgtttagaggtgtgtgtgtgtgtgtgtgtgtgtgtgtgtgcatgcacacacacacattagtaataggaacacacaacctgtaatcagcagttctaagtgcagcacttgatatcagagttcacttgctgcaaaggaagttacttgttcatgcatagtaaattatgcaccttttagtttgtttctagtccattaaatcttgggccagaaaatgggtttgtcacttctaaaatttggacccaagcaagcatatgtgtttattcatgatgctaaatcattttcccacacactgtgttcaccaacagagtaaatgccgcttaaagctgtcatattggcaagagcagttgatgcagtgacaggctggggttggatagagacctggttcttaaatagtcaggtaattaagatatctgaaccatccctgatcactgcccacaggttacacttttcttagcttcacgcatagaacatgtgattgggaaaaccgatgcactccctgagacagtgtaaggatactcgttggctcagtggctgtctctaaaatgggaagagtgtgaacacctctaagaggatgtaagaatgaggccaataatgcctgtgaaaattcctggaatgaaagggctatctgtacaaacaccaggagtttttctcttgcttggtccataagaccctccaatgcttacttggagtggtggaggatcttcatgctttgccttcttggatttgggtcaaatctgctgtagtttccaatttaccagctaaaccacagactgtggggatgtgcatacctgcccactcactgtagtggattggtttagctttttccctctgcaggttaatttttttttctttataacagcattatagacatctcactgaggcaggttagcctccgtctcaagacagtgccctttgtagtagccacctatttgactctcaccctgaactatgtttgtctgaagagcttgcttggtaccatgatgaagttagtatgaatgtatatacatatttggctgcaaatttcagttttgctggccagaaactcttcatggctttctcctgacaactttagaacacaacatatattcacaaaattagtgatcatttagtgtctgcctgtctctcacacctcaacgtttaggcagggtctttctcaagccatactcgccagcagtataggtctggcctgtgagactgtcaaaccaggaggcaacacagttttcctcagttgccctttttttgtcctcgagagtcctcactgtcacttccttgaatcctttcccaccccagttatccacacgtcatctgcccttcctgaaacagagaggtggctgctggccttggcagacaagcctcctgtgtgttctcgtcgcccctcaagctcctccaggttcagggatgcagtcctttcagccgtttcctattagtcttgtttttcaatcatctcatcattttttttcagttcccttttgagccctttctaagttcttctttcaataaagtggcaatccccagaactgaatttacttgagatctaaacagtgccagataagaagaaaaattaacttaggattctaaaatcaaatgtccatggcttccactttacaggcatttaagtaaaaaatattgagttgatcacttgccccgtgtaaacaaagaactggatggtacacgtttgcctgagtgcgcacgcacatgatgggagggaggtgctggccttctgcagggccacagagagcaagagatactctcacagacactgtgaccactgcttgccaagcatgaggcagccagcagccttgaagtcactcacaggcctcagtgcgtgggtgttatttgaaggtagacagaactggacttgggaaaaattgtcaaggggatgaaaggctttagcatcaggtgttttcttttctccttccccatcacccccagacatgccctcctgtccccatgatgatgaacgtgcaggccagtgctttgtgcttggagggcacagttgctaagggaacgcatgctgatgaaaagagaaccttgccaagtgttcatttcctccttccctcatctctttctgtgttctcatgacccagctctcatctgaaacacaaactgagtttgaggaagcttaggaacagtctcccctctagcccacacccattttcatctgcttccagttatatatgaagaggggacagtggaaataatccagaatcagtataaacccattatactgctagtatgtttaagtagaaacttagcaatagaagtatgttgctattgctatctttactgttttagtacctagaaccttcccattctttcttcacattctttatagattttatatcagtccattacactttggcctgaaggagtgttcaaatacaactgatttttctgggactactagatgtctgtttccagtatttggggggcatagaagaattccttgagggaaagagtggcccaggagtcaccctttgtaaaacactgcacccacagaatgggatctacccagtggattatgatccaccaaggtttggcttaaaccacacttagctgactgtcaagtccagccacctcctctaggttggcttcatctcaatcagagaggacaacaatcatcttcttgtcccacctctgctttgaacatcaccttgagcactatcattctgctctatgtctcagggaattcaaacctacaggggagtgagtggcagctgtttgatatcaaaaactcaagaatctctgccatgaaagaatggggtccaagtcaattgcactacatgctgcatggcagcctgaatttcagttcccagctgtgtgatctcactttcttcatctcagacaggtatggcaaagtgcatatatatatatatatatatatatatatatatatatatatatatatatatatatatctatatcaggaataggtgctgaggattgagtgggttagttcatgtagagtccttctcccagggtctggcacagagaccacctccataaatgctatctgtcactgttaatattattattaaaatctttttatgatttggggtctatttatttatatttagagacagggtctcactctgtcacccaggctgaagtgccgtggcaccatcatagcttgctgcagccttgaactcctgggctcaagcattcctcgtaccttggcctcccaaagcactgggattataggcatgagccactgcacccagctctggtgaatatttaatacacatacatatatatgtgtgccatagactaaattgtgcccccaccaccaatttatatatttaagcccaaattcccaatgtgacagtgtttggagattttaggaggtaattaaggttaaatgagattttagggataaggtcttgatccagtagggtttgtggtcttatcagaagacgaagacagagagagcgctctcactatgtctgtctcccaccatgcacacacatcaaggaaaggccatgtgaggacacagcaaaaaaggtgagccacacccttccacaatctaggaagagagacctcaccaaaactgaaccctacaggcaccttgactgtggacttcctgggcttcaggcctgtgacagaataagtttctgttgtttaagtcacccaatctgtggtatttttttatggcagcccgggcccactaagacaacatatgcatgtatgtgtttatgtgtgtgtattatatatatatatatatatatatgtatatataatatatatgtgtatatatatattatatatatgtgtatatataatatatatatgtatgtatgtatgtatatattgtggtatgtgtatatagatcctagaatagttcttattttaaaatggtcatgcttataaaaatcatttttctcctatgtctctgtttgattcttttcatcttctcattgacattaatgttctgcccaagtgtcccaccctgtatttccttaatttgtctctttccattaatttctgcaatccctgaagtaaacaaagtctttctctcccttaaaattgtttgtctccaaacttgtttttttgagttgtaaagggaaatatttttgactatgatgaaaccttatctcagacatgactattgagtttttttcttgctgtaacattagtctcctgtctcctatgtaacacatttagtttaactgcccttagtagattatcctacacttccaagtgtatttttctccttacgagtagataaaacccacaattactagcagacattcttcctaaatcagggtcccaagtcaagtaatagtcatcatgggcaccatttattatatacctgctgtacgatgacacttttacgtgtgttaactccaatcatctcaacaactctattgactgaaatgaataatatatagatgttgttctttacattttcctatgagaaaacagtgaagttgttaagtcagaattctagctcaggtctatttgagttcaaagctcgtgtgtccttttgcattacagcctgctgcctcttgaaatgtttgaagtgttcccatttcaaagctgaacatggaacttgttcagctctggccacataggctctttagcatcactgaaggaattgagaaaacaaggccatagattgttccatcttctctatcattgtctcattttagagtccctctgaatctgaccagggactttctgatagagtcatggttttcatggtgaagaaaactagagggtgcggtcaagagaggtcactgtatagtgccagatctgtgagccataagatatggcctctggcagtgtatctcccttgctgaggattttttcaagagctgaagcaagtccattcctgctgaaagccacagaatgtgctccttagcaatgatcgcagtcaagggaacctgctctcagaagtagttcatctgcctgatgcatctcttcttcattcctcaatcctcttcttctgggggctcctgttaaggccttctgactctagaagcctcctctgccacacctcttagtgaggccaggagtctacctctatagcatagaaacccctgcctgttttctggtgctttacctagggctggaacgatatccagattcccatttttgtgagaaccctggaaagaccctaggcagagatatgaaagaatccattctctttaaactactctggctgcttactgcatctgcaatcctgttgtcgattgacttatgcagaaaagtggtgagaagagtcctaatatttcagcccatgtcctccaacaccgcaacacttcctctaccaggcatcaccctgtagctaagtgtttaagcctatgaataatccgttcaaacttcctaatatactataaggggcattagtaataagtttcttccaatcacttgctggataactccctacatctaccatttccttgtgtgtgttctagtaagccaaaagatttcagccttgaagaagcaagcataaatgatttgtggcagatcctgtaggttttactctgtatagtaagctatgtgggacagggatttttatcctgctcaatatgttgattttatgtgatagttttgaaaattttaattgtgatgacatagttatcactaggggccccaatataaagacttgccttttgaaaactgtgaaggaatggatttctttgctcattgcctgtgaggatacgttacttgcaccttgctgagcttacgagaaagagctgagcttgttgcattatacagtattgagattaatgctagtcactagctcatgtgaaattaaggatgttgataaactgcagacctatgtctacgtctagtacattaggcctgccttgtgggtcatgtctgtgtgctgtttaggaaaaggcaaaataatattggctaacactttcatgaaaggctcctgtcgtggcaggaaaggagtcagaaaggtaaaaatctagtggagaggagcagcaaatgtcttaagcaagtatagttaacctgtaatgagagtagaaggcacatacagaaaatgataaagacttaaggttgtgtttgtaaaacccttaatatatttttatttgctttgggatacaagtcttccatttggtctcaaaggccagtttgagtctttaaggactcagtcctttaggggaagtcacttttcaggctgtgacacatttaagtagaaattaaagtaggtcatcctgctactaaagcacaacccccaagcaagacaataaaacaaatctgacttgttgggaagggtcaaggctagaatgagcaaatctcattggaggcaaaaagagtctatccccaatattcaaccctatgaaatttacactagccaacacaaattcagagccattcttggtcttcaaaatttgtcagtaatcattatacaccccctgagtcagatgtataaatgaattcagagttggttcactgccctgggttcacatacaaatacatttagagtaggatttacgggaacattggctgcgaagtacggtccacgctctccctgcagccatcagcccctctttcactaaatggatgaatgcaaaatgcaaaccaaaagatgaaaggaaaagtgaagaagaaacagaagaaaagtatgaaaagggaactaaaataagaacatagaaggggcacaaagacagctggtcccaaacctgtgcactgtcgttttccaggctataccatctgacattgtacttcctcactttttcaggctactgtcatttgtcagggaggttgctatttacttagaatctaagttaggtctaagcaacagttgtcagggggattcattcttcttaaattattgggacttcattcaaaatatcctacaagtttgtataagagtctgtggaaattttctcaactgtgaagttgatcatcttgtagtcttctgattctagactaagataactactactgtagtaatgaaagtaagtattagttcatgtgcccagctcttaaaagaaatcaggcggagggccaagtgaaaaaataatacttggaaattaatcagtatctttatcccttcatgcaatcgttgttgggaattcggatgcctttgacatcgaacattgagaaagactaagtaagaggtgacagctgtggctgaacgtattattgctatatatggttgaggccactttagtctacaattagtctacaattctgcatgctaattttaataaggctaatagtcattgagatgtagaccgtcattcatcaaatgtagtgaatggtggaatatatccatttttaaattatttttgttctaacacatcttcagctatttaagacaaaagagtgggtaaataatcattgtgcacattagaattatactgagattatcgattcaaggtttctagtgagtggattatcaatatgaccaactccagatttcttttggaattactttcgatgagcacatcagtgtatttgaatagatcatgcataacctagattattggtacagcaaatcccttgtaggatgtgtaatgctatggctgttatacaacttcagtaaaccacattgttctaattcactgaaagcagtttacccagcgattactcaggtgtgttaggtgataagggctctgtagcaaaagtagattgttttgtggcaatctattccaaatagcccaattcaaaatgcacactaagttataccttcccagcaggctaacactctgtgctgcttaggaaaaagcagaatgacaaggtctgccctttgttggctgagatgccagctactgacctctgacttcacctaaagaacctaagaaagggagagatcacatgtgttgatagcactctggaacagagggaaaggaaaggctttatctggacaaaagctattgacactttcttctgccctgggacatgtatatggtagcattattagctccaacaaatgtttcatccccagttagtaattacaggagcatatgtgaacatgtttatatttatttataaccaaatgtccaggcatctcaaaatatatagaacaaatctgtgtctgaaaaaaatgaccatccagtgacaattcatgtactagatataatttgctttttgatacccacaatctattacttgcataaaacctttcacttcaagacagcactgaattacaccttttcaaatattttttaaacaaatttgagcacctattttattttacttttgagacggggtctcactctatcactcaggttggagtgcagtggcacaatctcggctcactgcaaaccctgccttccaggtttaagcgttcctcccacccgagtctcctgagtagctgggaccacaggcatgtggcaccagagccggctacatttttttgtatttttgatagagacaaggcttcatcatgttgccaggctggtctcaaactcctgagctcaagcgattcgcctgcctcggccttctaatgtgctaggattacaggctgagtgcctattttaaagaaaaaaacaatcacagtgattatttgatacatcaatcagatggctaaaacagaagatatgtgagtctattatcttttgctgtctgatatgataggtcagaaaggcacagagatggtcagcacagtggtttccatggtttagttacattccttgccttattcaaatcaccttaatatatctgcgtttaccttcaaggcagtcactttagacattattttcatattttagttagttatacttaccttcttcatagacaacttcattcccatgattcctgttaaaactcattgagatttcggtgtaatcaccttttgatcttgcaaattcaagtaatgaatggccaatccctcttcagtgatagcactgaattcatttccagccagaatagtcatcgaagtacaatcagaaagaggaagaaaattccagtttctcttttcactttttaaaaaacaaacaacaaaagattcactttaggaagccagtggaaaataccagaatttgattttcttctttactaaatcattccacaagattaccaacaccaaaaaccccatatctcagctcagtcctttcattctgttcctcaattagaccacagagaagccaggatcaatacagccaagcaccactgttgttttcttttgttatttggggtttgttttgttttgtttgagacgaggtcttactatgttgttcaggctggcctcgaactcctgggctcacacgattctcctgcctcagcctccctaataagcattactgcttttaattgtataaattaagactgtcatttaatgtacacttagcaaatttggtcctagcaaatttcacaagctgaattgttctactttgaaggatgccatcaagagcgtcactgatgaagatttcttacgatattagttgttatgttctggatataagcaagtatgttagcaaaccataaaaatctataatcttttttacttctcatgtgttacatagtctggcacatggggataaaagcagaagcatttccatttctttggagccttgaataggataagagctctgtggacaggcagcgtacgctggtccttctcacctagactcagcagccaactgtgaaatgaaagaaggttagcaaagcagccgagagccatagcaaatggtaaaccatgttgtttatccacagatcattcaggaccaggtctcaggtccatcagaataattaacttccctataaatatgtatctctgcttcatatgaagctaaattctggagctaaggcagtgaagcaacatagcctctaagcgtctggaattcacagaaaaccaatataaagatttcagtattgtaaagtgaaggacccagaagaggtgcagttactcacaaaaaattttaaaaacaattctaagcattgttgactccaggaactaaatactagtttctattatcagcccatcatatttatagctgtatgtggttctactaaaaattaattgttaattatatgaatgatacataaaataaagagcaaagaacctatttacaatgatttcctgaaattaacatagaagggtttcatggcctatgaattatccccaaccagaatttctgaactatatttgtaaccatcaagttcctttgagtacaaatgttttttaatgccttttctctggagatacaaataaaatgttcctagaaataaaacacatgattgcaccagattagtgtctgcggtctctaaatggtcttttaatattctaaattcattaagggattctttaatcatcgttactactcccgacacaaacctccttacctaaagaaatacctgtacaaagcatttattattttgtcttaagagcctgtttttaaaagtctcccactgcccagtaaacagtcaggttcacatcataattagccataacagaagcactgtgggtttccctgccaacatcaggggtgtgttttcaggtaagtgaggctgtactttcaggtaaatatgactataaaataaatttctgtagactatcttattttcacattgacttctatataaaatggtatgtatatactaccagagaagggggaaaaagctaacatggaagtctgaatgaaaaactctgggacaggaaatggggtcagtgttctggccagcttgtatgtggtgtggtccagtcttacataccagctgcctatttggagatgtggttctactagggattatttattacccgtggggtcccctgtccacttctgggctctaggatcttcttccaactcatgggaatttcttcaaagtctggtggtcttttgactgcatgttttccaaatcgagcactccacgcgtttccccaaaacaacaccaacctgcaagaggtctggagctgggtcatccaggggtccccactgtgtattcagggtatcctaaattggaaactgcctttgccttggggctttctgttttataaagttaattttcaactttattcattttcttagtcttggatcccacagatgagtcgtctttaagaaagcagcttgtgactgggaaccttgtctcactcccctttgtgaacctcaggctgtcctgggcttgatgtataataagagctcaacaggtgctttctgttgcagtcaacaggtgctttctaaacagaaagagcatgagactcactcgtgtggaaagaaatgctggaagaggcaaggattccacacagctatatcgaggtgtgaaacaactaaaatacccagcaggtggtctcagcagtgggaggaaaagcagtcaaaggatcctttgttctcagctctaccacatgttagttaggtgacactgagcaatgtacttaaatgctctgaacctcagtttcctcatctgcaaagtaggattaaataatacctctctcacatgtgagctatgtaatgtgactaacaaatgtttgcttccttttcttttccctggtgaatactgagtgaactgagcattgtttatgatgtccgataacaataaatgcaatatatattatatataatacgtgtaacagcatatttgattcatatataacatacatataatgaagaccacttcctactttccagtagtctatattcgacaggatgtaaggtaaacagttgttatttattcttttctttcagttgttttttttaatgccaacaacttgaaagacacctggtacccgcgtgtgagtgaacagcatatatttctagccaaagcaaagcagtgacatttttaggccattcaggaccagtgcaatgtattgtttatattacttctgccaaggtgggaattcctcctctaccttgaaaaagaactctgaattcaatgagagagaagcacagtaaggaatgagcccttagattcggaagtctaccgttcagtaatttaacataccacatgtgtgcacagcagatgtagcattgcaatgaatatttgtgctctagaataactattggaatcctctccttgaggcaaaaggagcctgtgctcacctgtgctccaaatggagccccggttcctctgggacaaaccagagataatatggagttgcccctgtggatcagaagccagtcactgtcttttgaccagagcctattgtccatttggctggatgttcaaatcaataaatctgcatccctcaaggctggaagtaaagcctaaactagcatcccagaggaaaaagtcagcactttgatacacagctcccccaaaatggaattttaaggagcagaagtaaaacctcatcttgctcagaaagtgggtctctttgttcttctcatgttttaacactttgctagctcagtgtctctcctttaattctgctgcctctttattctgctgcctctcttttaaggactgaagagaggccatctatggctcttaactgttttctcacctaagaggtttcaatttacatgttgtgggaaacccttacgaaaggtgttttgaggcatcacagtttgctgttctggatttattttttagcagaaaaatagtcaaatttaactaatccaatttggtgttgtgattgggaaacatgtggcttttggtacctgacagtatgaacctatgctatcctttgtgcagttgactcattgaaaggcaaaggaaggaacagaaagctcttagagattcttaagggttaaataaagcctaaacctttgatgtgtgtgcttttatccactttgagaaaatatacttgacttagattcttattcctgaaaataaggcttttgtttctgcacagtgctggattgttaaaagtcagattgcaaagacacaatttgtgaatctttttcttccccgtaaacagacacatgtgggcactttgggcaccatccaggttctccttgaagtcgcttggagtccacatgtgtgtgcctgagcagtatagcatcacttcctgagtgcattcggagggcaatatggcattttaatgagcgctatcacagtgtgattgtatcaaaaggccaaaaaatttaagaaatatttgtttctttccaactcttttaactgctgccaaaacagagtggaaagataggcaatggagtcctgttctcactctccagccaggcttctcatatggctcaagggcagacccacttcttcccaaggctaacccattgcttacggaatggaggcagttttctcacagagcctctccttattaacagcaaagctgtcttagcagctattaaatgctcacttctaatgtctgatatgcatagtgcccgaattcaggctctgccgttgtcctaacggagttatgtcacaacagtgaagaactctgggtttgaagggaaagttgagtatgtcagagattatactctatcacgtatgggcattttctctgcagtctgagcctgaattggaagaacatcacagatgcatggcacattggacaaggagcacatgcatgcatttaaatcatgtatatcttacttttttactgatgtaattgtgaaatatgttctttttgcattcataattagggggtggaacagatggtgaaggcttagtttaaaataatctgtcattaaaataacctagcctactggtaattcttctctctaactggagttaagtcacaggaaaagagtttgggggtgatttttcccccttctgtactggaatgtcaaagaaagaactactaatttcagagtgcttacatactcaaaacttgtccctaaaggagcaccatggtaagatgtcactctgtgaaatttggctgcagaggaatatgcacaaaaaggaaagcagaggcaaaactcctttgacaaatataaatccatttagcacaatgcattaaacattagtataccttcagtcatggacctgtggttagttccacaccctgcaaggaagtaacctcatcatttgacaagtactgttagaagcattcagcttttggggttaagaaactatgccttacactttatatgttacactaatgtcaggggatataaattataattacaggctttattattcagagatgctgtaactcctgacttctgtatccaagcctcacttcttgcatgtgtacctcatagacttactgggatgtgacaaaggaaatctccgatcagccctgtctggatggctaagaactgttttcagtaataagaaaactgtcttgataaatcagatacttgcatgtctttaaaatgtctgttttactgtttcttctaagattgcgtttcccatctgctttgaggaaagcagatagatttcagcatggctttataataaatcttcttgaggagggactagcattaacatttgtgtaggttctttttcatcttaatccaaccttagttaataatcagaaaattctacatagtgagtaagaagatgtaattaaccctttgaccccagaatcttaattggcgcctgttgaaaacagtgggcagttgaaaaaaaattaaaaagtagcctgcagtgattgaactgcatagtatataatagctttcttgattcaaaatttaaaaaaaattccacagaactttgagattaatcacacttggtttccaagactaactgactgaatgttttcttcctcctcccacctttttaagttgataacacccaaattaaaccaacaatgatgctacccttcaaacttttctaagtggcaacatgcagctaccttatagcagagacaatcctgaatcagaaggtagtggctatgagaaaagtgaccttggcaatccactttagacctgacttcatatcccattttttatttgaaaggtaatcaaatctgagatacggacattgatctgagactataggtataattgactaaaatgataagcataaaagtgaaaaatatggtaaattaaccaattgttgttggtgtgtctgtgtgtgtgtgtgtgtgtgtttcacttctgtgatgactaacaactaatttaactagttgttttcccccctaccaaattggccgttatttttcattgaattgactggatgtctttgtgtcatgtagacgtagactcattttaatctcaccaggaaattggaacatgtgttgaagcctctgtttttgccaaaaaaaactggccagttcttagatcgctactgcttaatagcatcagatgtttagcctccagatattcttttaccctgctatggtgcccaaacctcctcaaatattttagtaagtacatgaaatctgaacctcatgttaaaaatcacaatcccctttagtgaggaagtaaaggatatgcgtagacagcaaatgacacatctattcagaaatagcactgggtactttgaaggacagaaaagaatccattctattctgaatatcaggaggtatcccagaccatagtggaaatctgtggaatctgaatctgtaaataatctaagtccataagctggactcctcaagaaaataatttccatccttactagtcattatggtatttgtgatataaggaaaagggagcactgagcatggaggtagaactggatttcataaatcttgattgagtggttgttagatgccagctagagaaagataaataaggcattgcctcactgttgagaaattcagtgattcagaaattctctagttgagagctgaataagccaaccagaggcatacaatgccataaatgctttaataattgtatgggagtgaagaagatttaatcctggctctgccactgactggccatctgatcttgtctggccacttagcctctctgtgcctcagtttcctcctctgtaaaatgaaggtttagaactataggagattatccccacaccagcttcatcagtccatccttctgcacccaaccaggcttccaactgtcccttgtgtccttggaagttctcctgtgatctttctttgtgttgttgctctaattgacaatgacatattaaaatttgagaagatgacttacacagttctccgtgattgtgtaccaagccatggctatcaggtcgaatggaaaatctaataagcccttttataagattcaagggaatagtcacaaaggggagggtcctaattttcatgagtcatcctcaggagacatcttgtttgaggtaaagatatgttgaaattagatccttcccaaacttgtaggaaggaaatatctctccccttgcactgcttcaaagtgaggttccgctatactacatccctgcgcttgaaaggctctatcagaaaagactgcagagggtttggcagttttgtcaaaggtaaggagcccagttcccttagacagtattttattcccaaaagctggttccatgggaaatatttcgcagcaaaggtggccaggtaacctcctgtggaagtaacttaagtaatctcttgccatcctacttcccctctgtcttctacccacaatgaaaggattctattgtttgaacacaaattgttcaaaagcaaggggtgatgtttaagatgtacaggctgcctcttagggtaaatattttaatttcagaaatgctgtgaatattcgccttttcattaatttacacatgtcaattagagaatctttatttttattgtaaggcagtatagttagttattaagtcccactgccaaagttcaaatctaaactccaaactaggaataggcttgttgcctaacttcactaatcctcaatttccttgtatataaaatgtagataataacagctgggcgcagtggctcacgcctgtaatcccagcactttgggaggccgaggcgggcagatcacgaggtcaggagatcaaggccatcctggctaacacggtgaaaccccgtctctactaaaaatacaaaaaattagccaggcgtggtggcgggtgcccgtagtcccagctacttgggaggctgaggcaggagaatggtgtgaacccgggaggcggagcttgcagtgagctgcggtctcgctaccgcactccagcctgggtgacagagcaagactccgtctcaaaaaaataaaaaaaatgtagataataatactataatttcatatagtacttgtgaaaattaaaagagacaatatgtgcaaactgcttagcacagaatgcttaataaatgtaagttggcattattgtattattgtagctaaaagctcatctatcatgtaatctgctctttagtggaacaatataatgtgacttttgaattgttttcagaacccaagaaatcagaggaggggattgggtgtcatccacagtttctgaccagtggggcagtgaaaacaggtcaggaaacaggaaaattcacttttttttttttgagacagagtcttgctctgttgtccaggctggagtacagtggcgtgatcttggcttactgcaacctcctcctcccgggctcaagtgattcttgtgcctcatcctcccaagtatctgggattacaggtgtgccaccacacccagctaatttttgtatttttagtagagatggggtttccaccatgttggccatgctggtcttgaactcctggtctcaagtgatctgccaaccttggcttcccaaagtgctaggattacaggcatgagccactgtatctggcagaaaatcaaaattttatatatacgtacatacatataatatatgtgtgtgcatctgtatgcatacatatatatacacatatatatataagaatatatataatatacattcccccaaaattcagtattttaggagactgaaattattgctaggatttgagaaggcacatatttctaactaaatttacacgcttcttccacctttctatattttacaaattttgtcattaatttagtgttttcatacaccttgctcctagcgcgggtttcctgtatttgcaaattcacggccttttttttttttttaacaccactcacatttaaaaactttttttcctgtacaagcagcatttgtgcaacttaccttgttaaaaataactataaagcaaaacaaaagacatgcggatgacagagggtgtaggatgcactggattgcaagaatgtgaaacaaatttattctcagtttgaatgctgtattgcagttggagttcatgatgatttacaccattcatcaaactgaaaatgcaaccctccatttggaaagtggactgaggttttaggagttacagatgatgtgtagcatcctttttctttctttattctttctttctttcttcttttgttccatttcaggagtggtgatagaaactaaaactgtcactataaaactttaacagagagttttgcaaaacaggattacagtttgtaagattgcagcccataaacattatcccttaatgtattgacatttcctgttgttctaacacaatgggcactgggagtaaagaaggcataattccttattaattagcaaattgttgatgttcatagtagtgcaagtagtgattttacttgctcttgatataggaagcctttttttctttcatttcattacgatctttattcctgttcaactatttaatggagaatcttgctgatttaatctcagtaaccactgaatccaaaaaaaataaaggcaacagctcataaaatcagcatgaccttattttgtacatgaatgtaatgtatcttgatcaaaatgacagagacataagtccctaaagtaaaagaaagctttcagtcttaattcagacatttaatttgttcatgtataatgcaatattaaaagatcttaggactttcgttaaacatggagaaaagacggtcttaaattcagcgtggccgggcgcggtggcttacgcctgtaatcccagcactttgggaggctgaggcaggtggatcacctgaggtcaggagttcgagaccagcctggccaacatgctgaaaccctgtctctactaaaaatacaaaaattagctgggcatggtggcacatgcctgtagtcccagctactcgggaggctaaggcaggagaacccaggaggtagaggttgcagtgagccgagattgtgccactgcactctagcctgggagacagagcaagactctgtctcaaaaaaaaaaaaaaaaattcaatgtattgctttttctcagttgccttactaattaaatctgcatcctttgtatttattaatctatttatatatttattctttttcctgcagtccctggatggctttgtatttgcactaaatcaggaaggaaaatttttgtacatttccgaaacagtctccatctacctaggcctctcacaagtaagtaaaacaattttagattcttggcagcgattatgaagccttcttcagcctcatgtttttccttcttcaaggaatattctgtttagcatgaattatcaaatgtattatttaatggctttacctgactgttctctcaaagtcagtgagaaacctgtgtgtcagtgttgaacattcagaataaacttgtgctcaaaaactttagttccgctccccaccccccaaggatcattattaatttatcgagaacaaatgaagtttcttcccttggttgttttgaactttgaaacctctgtgcccagtaggagagggacacactaatagtgcttcccttgtgtcctattactggatgtttatggagtaccctgcattatcctgggagctgacacaatggcaggagtcatttggagtcaagaaatgccgaaagagaccattaaaatgcgttgcagggagggttccagcaaggatatattttgctgcctttgcaaatgcttcctaatgctgaaagatgatttcataaaataagacagcttttcattatttgccatttaattactcacatgtgtttttcggaggggaaaagaaaagaaaatggaggctgatgggccagggacaaaaatcctggatgttacttctcgatattcccctggaacacaaaaatttaagttccagtgaatgccaagacacgggctgcatctggtgaatgccaaaatatcctgaagcaaggtttgcacttcagctaattatccagatgttttctccataaaaatgctgaacatctgggtatttgcgcccatacaggtgattggctgagtttgacccctttcatctggtagtttggcatgaggaaaacactgcctcagtgggagggattttgtgtgtgtgtgataatctgccaagttggataatctaccgctcgttcagttgccccttgaagctagagatagagataagatttgtctctctcctttaaagcaggacctaccccagactcgttgcttctgaaagttggcacagctctaaggagacatccagcaaggctggactcttttggctgtgagtgagtttgctgggtaatagctaaatcaagaaagacattggaaaataatagagagagagatttggcatgtaaggaggcttggggaaggaggagaaacactgccaaatttgattatttactgttgagaatccaaacaagggtctggtctgttaatgccttttgaagaacatgcaagctctcagctatagtgtgtggagtaattctattttatgtggactttagcaaaccaaatgatagaaaccgagcttttgttaactcggtattactattcttgtatcttattgaaagatctggttttgtaatagcctttaacagactttaagccttgtcttaatctgtctgggacctagtattgagaatcttcaattttgaaatcggtgagccaccatgtcgcgatgttgttattaccatacagaactggaaacaccactgtttgttgttctgcaatgcacatattcatgtttcatgcagggtatccagcaaagtttaataagccagtaaagaagaagggtgaataattagtttaagcaggtaaatgctaattagggaactcctgaaaagcatccattatatactagctcaaaacacattttacagccctgcttagtggtgtaatccaaattctgtcaaggcaactgcattttctgtaattgagatgtgtatgtttgctttgcataacagatggctctgtatgcttagactgatagctaggaaaataataattgcattattctggccaaaagaatattagctcttgggttttggccatttcagtcagtcctcctgccagcacagcatatgcacatatatggatcggattttcaaggaaattgatgcatctggaatagtgcggccatctgaaatatcatctgttcaagaaaaatttggctttaaccctatgctggtttctccttaaaagtattttatttagctgcttttctactgtatcattaagtaaaatctgagacaaataattgacgcttctgtgaaataaagcaactgtgtagacatggtacagtatctggcaatttttgtgcagtcagtccttgcttttatatataatgggttttaaagcacgtaccagtagtcggcatcttgacttatccaggggcagaccctggccaaaatgtgccattgccttcttctcctgtggtggatgtgttcagtgttggcagaaactgtcaaatatgcaggtagaggctatgagataggagacatgggccttcatttggcagcactatacaactgaattgatgaggggtcaatcagtagaaagtgatttttgcatataccaatttatgtatttaaaagtgatttttgcgtataccagtttatgtatttagagttcaaaactaaagcttaagtatagttctgcattaatatgaaaagaatctgataagaacatgatatatttttaaaagcccaaagcatgagggaaaaacaaaaaatctatgctaaaactctggaaaagagttttcaacccagtttgagtcctaatagagaaatagaggtccccaagatacaactctttccaagtttcatcaatgccctttttcagttttaggggttgtggggtgatatacaaagtaaatatactctaagtaaattaagcatttgttcttttatgagcacacacacacacacacacccttaatcaaatgcaaaccaaatgctctgcttgtatgctacaactttggctaagtggttattctatcaaattctagacagtgataaggaatctgtaaagttatggaccctcctttcctttccaaatagttttgttaaataaagacaatgtgtaactctgtcatcaaagacttgtccagtgaaattgttcaggaggactgtgagcatgtcagtttgttacagagcatagctatgtctgtattgctaactctcaagatatcccttcctcagttttattttctttcaatgtgtacataaatgtggtggctttaaaacagcttatgctcaggatagaattaggattcttttttggctcacaagaaaacaagatagggaaacttctactgagctctgttgtgtagcatggggatagagacagccagagcggattttctctttgactctcccttgggtgggacagctcctggtgtccagggcatgtgcatgccaggtattctctttaaagtattctcatcttgttgtaattatgggaatgagtgaatgatgatgatttctgaagctcctcaacagtcctcttgactttgccagatacacatacatacacacacacacacacacacagagagagagagagagagagagagagaggagagatgtatatatttaacctaacaacatccaagaactggtttcaggttatagaagtatgcactgttgacttgctttcctgtgtaaaaatgatgcccagttactcaccaagaggccttatcttaaaggaagattcccacatactgatgctgagtttggcttgcatagagactgaataacttgttatacctgatgatggcattcagagctgttcatgacagctctgctttctagctataatggaacaggcagaagtgaaaatgaattaagaaaacagaatgggttccctaacactgaaaatgtagcaatgatatatagccagcgtttatgaaatctcttccaaaatgtaaggggcttaatcgccaaagaatccaaaagagactttacatgataaataaaaagtatttctagttgatacaggatttaaagcttagagaaatatttatttgttggcttatactctcctctttccacaaaggatttcaaatagcttacataaacacatatgataaaaataatgtcaaaatagaactagggaataaggaaaaggagataagcaaaagtaggtaaactgttaccacatagtaggaaaacacaacaaagaggctcataaaaagaccatttattataaatggtctttattaaagtttcagatgtaaccatgagcttcatggtaaccaaagcaaaaagggaaatccagtaaaccatcaaaaatgaaaaaccattgtttcttaaggaaggcaaagtttttctgggactgaaatctgaaaatctcacgtaggattttggaagagctaacctgtagattatgacattgatttgcttccactggagtccatattcacagcaaggctgtcgtgatctacacagcaaacacaaagacccaaattacaaatctcataagcaggcagaagcccattccccgccagccatagctgtgcggaagaccatcggagagcgatgttctgttcccgcatccaggcctcacaatagcattggctagtttggtggtttacagggtttcaaactggctttccttcacccatactcacatcctgcattttcttctaagccctcatgagaaattcacattatcgttgccagaggcagaggacatgagagactcagttaaccagagaatacaattggactcacatcctctgaaaacattttttctggaaagtgaggtgagacaggataattctgatgcacacctatcccagcaaagtgcattcaagttaatatagggtcctgtttacaacaaaaatgagatctagagcaagccaggaaatttacacatttgtatggggtgataccattagaaaataccctacgtgccagctaaaacctctcttgaaatgtgttctaatcaccccccactgcctccagtcccctcctgcacataatgagtcacttccctttttctcaccaagtcctcacccttatataaggtatttcctgactattgtaagccagccagaaggtagctgcagacaaggttacaaattggcttgattcaaggcagcttgctgaaaagggcagggtggctgcagattataataagagttaatagaggtgaaggtgaaagggggtaagtggttgttttaaatttggtattttttttaagccatgcagatatatttgccataaactcctttccttatcctgttgttcatctccatattttagatttctctgcatttgttatataaaatggcaaataaaattacagctacagcacacaagtacaaggtcaaataaatgacagagctcagtctatttgtgaagctattctgaaagggaaccatggtgccaaatgtggtttatttgaataataaagaagaattagattcccctgataacttggccgagggccaataaatcactggaggttaaagatgctttgcaaccgccatgtctttcttttgcttttccaaagtgcaaggctcactcttccattctgtgtttttcaatgcaaatcaagttgaggttagtatgtggctaatactcttacttccctgcttgtagaagatatatatatttctttagtggggttgaaaaaaaaaagaagacattagctttccttgtaagttattattcttgtttggcatcatgacatcctaaagagctggaatataaagacaaaaaaggtattatttcaacacagcagagggattacaatgatggagccaagtgttagcatttttgcagttggtgttctaaatgtattcaatgctaggataactggagttcttttaataaatgaatgcaaatactgctttatggccccccttttcaaaacgtttcaagtagacataccttaatttttttaaaaaaaagcagaaaaatatataattttctgcagcttgtgaccacccccctgccaccccaaccagcaagtctacatttgtctcctgtacactaatcatgaaaagttcatcacttctgggtgtaacaaagaaaaatgcccttttgaatgtggaagctctgagggtttggagactattgagaaaatataagtatcaaaataattcagaaacagtacaaggcacagtggcacattatcaatttacaacatttaaattgataaatgcttggtggtgaaggcctacaagggcactttgaaaagcaaatagcgacctggtgaagaaattgatttttcccccccgaaaatgactgcatgatgcatcatttgactgcatgctgtccgagtgcttgacagagataatctcagcaatcccacgggtgaccttatcgttctcaccagggcaactttgtctacgttctgactttgtgcatgtcaaggttcctcccggcaggatccttgggggaaaaagttcctctgttcgatccagatattgaactgctcgttcttccccccttttccttccaccccacccttccaaataggcaaacacgcctctttatttcatccataattatgaacgagccaggcagaagaatacagctctgtgctctgtatctttgttgaagctcctaatgccttttagttcatagttcttaggtgatcatctatattggcagggatcttttcatcagaaagagtagaaaaaatccctaatgttctcctataatgcatcgccaccttgagcagagtggaaaaaccttaccagtttctttcttctctgtagttgcagggtgttttattttcctccctcccctgtcatctttacatagaacccttctgaaactgtcttaagtcatacatgtcagtatctaacaatattattctcttgcaatccagtgatttaaggtatttctcttataaccttaaaattatgtaacaatgacataaggcccagaaaacatgtcacctgtgctatttggctttgaatcccagtggcagcctctttgcagagatttgatagaatccacagggcttcttcaggaccgttggtgtttggaaagtatttttcttccacagggtaataatcgacaatttttttacgcctagaatttttctgttgatatgtatggatgtgtggatgtgtatgtctgttgatcagtaatcttcctgccacacagcttgtcgttgataattacaattcttgattagccacttcttgaaagcagcaaataccctgcctggtgtggcaccctgaagcttcagtccccactgcctctgacaccctcagttcaccatattcaaccccttttacctccttctttcatccacaacattaattctgagtgaacaagacgtgcttccttgcttttgacaagatttgctgcagtctcatgcgacaaaaacccaacactcattccagattcagaaagtaggatttataacagcattttaatttaatgttggatgtcgaacatataaagagatcacagtagtactagagctgaaaattgatgccttttttattagtgtcctctcagaagtgggtgagacgctgtttgtgcaatggagcacagagcagcacagtcagatgaatgaggatatgctatctgcaaggaatcatatttcaagccactgtcggcctctattgatgtgctcagagttgaaaggttatgctagtaaatgccatccgaatttccagcattagaaatcggtagaataatctgctggctgtcactctatgcttagcctgaatgcactgcgtggggatgttttacttattttaactccaaattaatttcttattacaggtgcatttctttctctcctcatgctttcatcagtgcccaaatgggactgatttttaacaggtcttcagagtagaccactatctgtgaaagagaatgaaagaaatgtgcgtcatcatacgtgagaatcatgttattcttatttgttcctttgaacatatttttccagacagtgaggctaaaacacaggaagtttgtgcacagcgagctgttcttgttagactgaatcatagaatctcaggataattcaagataagcttaccattttcaaatgtatgaatcgaaaacctacattgcttcttaatttctggacttaaagtgagcaagacaaaaaaaggaagatggagtattcttcattttatagttgaagagatctaaagtcagaaaaaaaatactttgtaaggagctagttcattttatttgtgtggattaaacagtattttcagattcattttgaagtagagcactgagcaaaagtaagattaagaaaatttagtcatcattctaagtctgtaatttattcatatttaaataatgaaacggtgtttttctgaattaacccatgtattattcatgcaggcgttggcaatataatgtccctggttttctggaaagcaatatgcatttctttgcctgacaagcagtattttctatatggtattaatttaatggcttattttattatgcaaagttagaaagtaaagataatttctgtccataatgcggtgcttatatgggcaatatatgcaaaataatacctctacactaaagccagctatcctttctcagttagcttggaccctataagaatgatgagtgaatgcaaactgctcatatgaagaaaaagaaataacttgaccttctgggaaggaggtctaaaatcattaaattcatgtgaaatccaaatttcatttctatacacacacattcaatctatattgggttttagctcttacataagaagataaggtttcatgacagaagtaacatggcaacaatttcagtgataatttcagtaggactgtaataaggaaattgactttagatttttgcataagttctagaactaggctggtaacctgaaaattgatgtcagttttagacaacaaatgccctatggctttttatctttcatcctcactcccttctttggaatgacagtccaaagatataatctctttttcttaaaatcatcattgttaaagagactgatagcagttgaattatttaaagtatcttttgatgcatttttgtgtgaatatgtgtttattcacatgcctatatatgtttataaatgcatacaatttgtttctttctgatatggctttcgtgcctactgcatttttatctacagatataaataatttccaaaatgactcactaaagcagcacaccaggttttcctctgggcgtctcctcctttcaggctcctacagctgcaaattcaccacattcaataataagacaaaaactttctctgatgctgttaatttttaatgtgctggcagattaaatctattactttcaataactatgcaaactttttgagagcaagagaatgtatgcagaaagaaattttccctgggaaggaaaaaatatggcctagattggatgttttcaaggcagttcaaggcccttggcagaggtaacacagatacctgtgggccatgtgtgggttttggtgaacctaggaagtatgtcagtaatatgcatctgggtatcaggtaaagaattacagatgctgtttagattttcatctaggttttggagaagcaagctttatattaagaaaccccttccctcttggccttctctcgccaatagaaacattgttttaggaccccaggtaatcctgtttagcactgctttgccatggaaacaaaaaaaaaaattggttcttcactaggaacgcgctaaggctttaaggaacatgcagatagaggatggtttcctgaacctctgagttttattctatagccttgaccttcacatatttgttcctactctactttcttcgatacttctttctggctaaagtccctaattgttaaacttggtatttcttaggaacttaaaaaacgtttgtactaaacgttcttgtccttataaacaggggagacgcagaaatatttccagaaaatgtgaatgatagtgctagctctatctatggtaaagatctggctctttaccataaaatgtacaggctcgccttgctttaagaaatgttaaggctaaaaacctgccagatgactaagtaagagattatttgtattacaatacagatggggtatttgtgttcctttaagtggtgagttccttttttgggctttaaatgtctatacagagattgttatctaatctacaaaatcaaaagggagtgaaggaaagagagagaggcacaaaaattaaagtattcagaggcattccattttaagatcaatcagaaatgaggatggaaaatgagattcttttggcagacaactttttaagatcgctcctagtaagcacagatctccttagccttggttgccaagtgcaatgggaatgttgcttgcaacttggtcatctggaagaggaaaacatgatccgactgttcagtctagttgtccagggtcacttcagagtgctgtacagcagcagttttgcatgcttgtgatgtcctgtctacataactgtgtgaattagaaaagtctacacatccctgaggacagaagatgcaaattcaaggaaaataagaggtgagactaggaaccaattccctgaaataataataaaaaaacccataatttttccggctcattaattaaagttgacgttgccgggtttgcaaagaccaagaaaggaccgtgccattccactacatttcaaaaccttttcacttgagcagacaagtaaatcatgcaattactgggactcattcagctctttagtaaaaacacgggcctgcaaccttggctgtagcatacatggaaattagaagagttgaactgaagatatttctaaaatgtcacaactgctctgtgacactggatgatatgtttatcctttcattatcacttagaacacctggggcggtgctcaggaaatcagatagtgccttttaaaataattataaaagaagcatagattagcaagctgaagggaaaacagacaatcctgaatcatgatgttactaattttgagctgtttgggggcatcagcttccaagtcacaacagtgtaataactgactgcaactgtcagcagtactgaggagagagagtgccaagtacgagtatttctaaaaagcaaatgtttcctggagatgaaatccaagcattcatattctgtttataaaattaagacactccgttggtggtgtttcctattgtcagtttctggctggatccttttgtctgttagacattgagtctttggaaaagcaggagaaagggctctggactgggatccaggagacctggttctggtcttgccgctgctgctagtcaggccagtgaccttggagcagcttgaatcttcatttttcttaagtgtgaaacgaaagggcaatttctcaggctccttcttctttaaaatgtgtgctctctgcagttcatccaacgctggacattttttcgtaagcactggggtagggctcgaggaggggagcctggcgaagtaggctattttatttttacccttcaaaggaatttagttgagcagatgctaccctgaactagtcagagtagaaaagaaatgatacggcttttaaagggcacatctagcatatctactggggtaaagtaattctggcaatgcttcaaaggatataacttttgatggtaaagtaggtaggctacggaatgaaatcacatatggcaggctgtcaaagtctcctacactttcagtacatttatataagtgcaaaaggaggctgcttagatggcgtccctagcaattgcctgctaagactgctttcagattatctgatattatttgactaaattatctctgtagaagctgaggacaacttttatgatcaaatattttgaaattagtttcccttgttggcagattatctgaaatatgaattgctctcatttgagcactcgaaattgaaaggcttttggtaatagcaattatacaaaaacaagggtactgaagtgctgtatatcatgctgaaggggatatgtttataggtcagtgatgtcaataacttgagttctcacagatacctcatcgctacccttttattgtgggctaatgcaaaggacagactgactttctttttcacaagggtatttcattttctagaataaatactgattttattgactctagacacttacacatagtcaattcatatttattatatttcccaaacctttcatagggtggctgagggtctaaaaagtggaaaatacacagaaaatatataaaattctaaacaattcagaggtattattattctaatgattgacttgtgcattcctggtgccttttctgtgaggtatttcaatcattctgtgagccttatctcttcatatttatagcctcctaattaacaataattacatttttttaaaaatttaaaaggctttagaacaagaaagaaaggaaaggacgcttggaagaagcccaagcaggtgacttgaagaacaagtgccctaactaacatttattaagctattactctgtgccaggcactgttctaagtactttaaatacattaaggtttgtaatcctaacgattgttaggtacaatgacagtctccattttctaggtaagaaaactgaggcaaagaggttaaatagcttgcccaagatcatacaacaaggaagtggcagaactagcgtttaaacccagcccacttgactccaaagcactcattgttaaccaggaacgctagttacctctggacggtttacgtaactggcatgtcaaattattcgttttatgtgttaagagaaactgagacatggtacaattaagcatcctgctcagagccataaaatagttattcttggccaggcgcagtggcacacacctgtaatccctgcactttgggaggccgaggtgggcggatcatgaggtcaagagatcgagaccagcctggccaacatggtgaaaccctgtctctactaaaaatacaaaaattagccaggtgtggtggcgggtgcctgtagtcccagctactcgggagtctgaggcaggagaatcgcttaaccccgggaagcggaggttgcagtgagccgagatcacgccactgcactccagcctggagacagagtgagacttcttctcaaaaaaaaaaaaaaaaaaaaaagttaattctcacaatgctaatggtgtaaatgaacttgtgaaaacatcagtaaagttatatagatatacctgaaaattctgatactcaacatttttagaaatattccaacattcaatagtagggccaagtaatcaataaaacaggtccaaacccaggtttcccatgacactcaaccacgcttttaaccatgcatgccagcattcagctagtatttgctgaatgacctacgtgtgcaaaaactgtgctggaaactgaggctattgatcactaaggcatagttcctgcccttcaggagctggtttctgcaagatgccttagacatggcaaccaagctacgatgacctacaagtagtaagtctcaagtattttagtgaatactgaatgtcatggtcacaatagagagatccactacaaatcatgaagatagaatgtggatgactaactctacctggagaagtttgcaaagaatttactgaagaaaaagtaacgcttttggtcagggtttgaaaggcattttccttgtaggaaacggaaaggtagcattccaggcaaagggaggcatgtatgcaaagctatttcttatgggagagatgagtctggaaagttaggacttggccaatttggaaagggtgtcagagtaagctaaggaaattggaatttttcctttagacccttgggagctgtaaaatattttaaagggaaaagtgcaatattagatttgtgctttagggaaaaaaattaattttggctaaaaagaaatggaggatagaaagcaccctccaattaaaagactgataaatagtccagaaaagaggtgaaaggtaattacattagggcacaccagtggaaataaaagaaggggatggactcgagaagcctttttccggtaagatcaatgccatggtgaccaatcaaatgtggtggaaagcaagaaggaagtacatttttaaaacttagtttggatttacacatgtggcatttgagaagctcgtgggacatctgttgaatggacagacttcagagctcaagagaggttgggttcaaagttccaggttgggaggtggttagcatataaattatacctggacccaaaggaattagatgagattaccaagaacaacctgcagtttcagaaagagggagtgtaagctgctgagaaggcaagcctcagaaaatctcagtttactgacaggcagaggaagagaaggcagcatatacgatacagcacaaatgatcagaaagtgacctggctggtatcctcctcaggaggaaccctgagaagttgtcattaggaaaggcaaagaaaaagcctttcagaaaggatgtggtcaagtgtccgaaagctaaaatattataaggcaagataaaaagccatcagacccatcagttgaaagatttccgtgatttgactgtcattggctagcgcccatgaaggctggggccaaaatgcagtggcttgcggggccagaggtccaaatgtattcaacaaatgttggcctctcttccaagcagtttggtggcaaagaaaggaggtgaggtggatggagggaccaaggggagggtgaaaagtagtttgagggagagaaagtgttgatggatctcattttgaagctgaggcaactttaagtggagaagctggggtgtatagaaagatatatttaaagactcaagagagggatcctcattgaacccaggtctcagaagaataagcttgatggtatgaaaggcatgaacctgagaaataagtagggttatctcttcctcttctgctgagaagtgggggaatggactttggaggtgggagggggaaaggagagagaccagttctgaactcatggtggctctcacctggtaaaggtgaaaccagaacaagagtatgtagtgacttttgctaggattggtcaaccttggtccatgcacacagtggtgcaagggacaaggatgctgaagtatcagtaatgccaggcaggaggaaagctcaaagcaggaaaggccagtctcaggtcaaggcaagaataattctaactcttttctaccaaacacgttaggaggtcctgccccaagacaaaaatcctaggaaattctaaggagagtaatggattccattgtagaccaacatatcatgcaattaacttttaccatttaacatagcttgttaaccactgctgtatggtctcctgcccattagctttcgactattaactgatgatcgagtccagtaacactgcaacaatccaagattcatagatcgtattcattgttcctattttttaactctgataatttgagttgaaaggaaaaaattgagaaagtattttctgtaatattttagactttgaaaccctcatttccttttccatgacccttaaatcacctataagcagcccatatgaagtagttttgccagatctctctaatttgtaggttttccaattgttcctaacatttctgtgagtgctgaggctcccacattccttttctgcctcatttgtgtctttgtactatcagaacataattggtaaaaagaatattcatgtggaggtacaatgtctaaggatgatacagtccttcagtgagctcttggtaagagaaatgatttgtttgctttgttgtttggagcttattttatggtgaaaaatttttaaatgcctttgggcttttaaaatctatttctaattgttctttttaacagtaaatgattataagatagaaaactgtttaataattgtaactagacatatctactctagtaatgattttgttcacgtcaaagtagataatatagaacatgtacatttaagaccttaagaatgtgtatcaatactgcttttcgtttcctgagaaagagaaaatggaaggaaagagagaatgagagagggtgaagagagagagaggaagctaagaaagaataaatatattccttgtagcaccctcccaccccccttgtaggcacctcaacccttaggttgccaaatacaaacctgtggcaaactggattttacaaatatttaaatggaatgtgtaaagtaagccatgatctacgcctgcttgcaaaagtgggcctcttaaatgaaacaaatgccatccatgtctgtttccagctgaggttataatgtgtgggatggttgtagcaccagattccctttgcatttggcgtcataaactgcacagtttatagtaccatatgaactcgtagagctgattgttttattatatttgagtgtaaatttttcatccctttcagttccaccacgattctcagagaatacaggttttgtgctgatacgatgtttcctagctctaggcatgccctacccaaactacggactgtaatttactttttggtgtctgtcgccttgagcttgccttctgactagcttgttgaatgatgtgctaatccattatatttttcagacaagtgtatcgaccagtataaacagactggagggcacaaacctaaatgaaagctatactaccctgaatcatttaaaaagctactgcttggtggcagtgtgaaataacttggttctgtacattaagtaaaggagagggagatctcaataaataaaacaaaaaattgaaatatccctgcctgcaggagttgtgtccgattttcagatgttcacctttattcacctctattgttttaacatgatgatcagaaagggccactttaaaaatgccctcttctgatacgaatcgagaataaaacacaatgtttagcgtctcctgctgtttgcgagacattcctacccagtcccgagtatctttcacttattatagcatgtttatacaaataaagagcagagagtaggccctcagaggaatttcagcagaaaacttaagccttacattgcccccttttgagtccttctctttgaaagagatttgggaatgaatggccaaatgggttggaggaaaataagtctcaaattaatattcctattttaaaaaacgtgtcagcaggacccaagctcttcaacttgcaaggccaaagccatgaagcaaagatttacctgtctcaatatgagtaaagacaatgtagctgatgaaacttttggtaggtacattcaaatctaacctaacaccaaaggaccatggcagaaatatggtgttctttaattataattacaacttgaccgaagtgaagcaattcctcgaggataaagaagggctcagtttttccctgagtacttttgatgcatgtgatttttacatatagttataccaggaattactcatacctcttcagattaccaatatgaaaaatctaaaccaattcttctcagatctcttcctctgctttctgagatttgtgaggcttagggtgtatttttcacgtttgttttatctttagcagccaggtacagcccatcacggactctatggtctataaagaggggggaggtttcagagcacgttcctatacctctcatttgatggtcaaagtaaccttgtgaggctgagtatgaaaattttatgcccatttgacagatatggaaacacagagagaaccaggaagtggtaagccaggactctacctctgcattccatctcatatcccatgcccttctttttcagaggccgtcatccagtactgagacttattctcctgctggggtgacggggtaaaggggaagggataaactgggactgatatgatattctgtcttctctaaaatatcccagtaaatagtgcctttcaaccgacaacagccccaaatagctttactccatttagggacagagaaaattaaaacattgttggccaagaatgcctgtgcagatcctgagccatagtccttacgacagcttgaaattctgaacctgcaggtgcactgacctgtataagggggattggctaacgaatcctccccccaattccaaaggcaaataaaaaggagtcttagtggccacatctttgatctctgatgcagtgtctctcggccttgtgccaattttgaacataccccattgagtttggaatttacttctgggccgtagaaaactgttgggatagcatgttttttctagttctttctaaaggccgttactgctcacagatccctttgctgctttgagagttctaaacctactcttactttgcctccttctctcttcagaagccagatgaactaccaacacctttgtttttttttccctctttgagacggagttttactcttgttgcccaggctggagtgcaatgacgcgatctcagctcaccacaacctccacctcctgggttcaagtgattctcctgcctcagcctcctgagtagctggaattacaggcatgtactaccacacctggctaattttttgtatttttagtagagacgggtttctccattttggtcagggtggtctggaactcaaaacctcaggtgatctgcccgcctcagcctcccaaagtgctgggattacaggcataagacaccgcacccagccccaacacccgtcttttgcacactcaggggtttggccagtggggctaataatctatcctacatttttaaaaagagccatcaaaggcctggcttatcataggcactaaacaaatatttgctgactgactgaatatcttccaacttccatagaggattttgctcatatgttaataatcctgcaatcaggggttttccaatgggtcagtcaatgctgaagtctgtttcagtcttccactttaatcaaccaagaggaggcatgactaggatcagaggtcatttaggaagactggttttactggcccaatttattcatcatctaatgaaaccacaggggaaaacaaaacaaaacaaaacaaaaacagggttatcttttctcacagaacaacacattaaaataattaaagggaattcaaatgttatcagcatctacatagcaggaagtagaaatgaacttacatttattgagaatagactaatgtgccaagctcaatgtcagcagtatgagcattaatgacaacagcaagttatacctgtttgagcaactgctatgtgccagaaacaatattaagccctcatacatggtttctcaatactctcaacaatcctaatgaggtagattctgctatcattccagttttatccagagcaaccaacaccagctagaaagtgagctctcacctccctgatggagaggcgaaggtgtctgctcaggttttatgaagaaaatgaattctagggtatgtctcaaatataagtcttcttattcacacatctcagtaattcagaccaaaataaataaagaaatgcagaaatcaatctctactgggtttcagtaataaacctttacagctagagaagcatcatattttattggatgatttgggatgggcagttgaatgatctacaggatctctgtatgtgacttgacagatttcatatttcagttcctcaggaatgttcacctgtaaaacaagaataattattcaggctctctatatattataatgaaagatgataaagactgatgaaatatggatgcgtagaatgaagaattcagaatcaatgtactccccatttcatagacgtgctattagtaacgatagaattgtcctcaaatagtttccctgttcagttgtgcatttaattaggggtcttttttttttcttcatttgaccaacatgtactaggcatctacttaataatactgtgaggaataaaaagaagagcaagttcgccttaaattgggagtatcaaaaataaactgtgtaatgaaatattttccttgaattttttttcaaagctgccaaagttggaagtaaaggccttattgtatctacacgaagccaaacatcaatgaaaaatgggaaagttcaagcagaaatacagatgtttgaaagcatctggatgtttggtatcttgtaggtttaccatatggatctccttataaagttcttctgttttatttcagactttcaaaaccaatttgaagttacatttacatttttgtgttttatagacaagccattttatgaacatacctttgttactcatacaatactaaaccttcctactgggtagtcttgaagctactgtcacaatgtttatagactctctggctatggttggtaaccatttttaatatatttaaaatattctaagatgcagaatttggccattggacaaaccaggtaaatgctgaatgggcttacatatgcacaaagcaactaagggtcagagaaccagcttcctggatggagaattcagagcaaccaacgtcttctttattaactgggcaaaagaagctgccaaaggtgtgacgtaaagctgatatctctaatatgttagtaaaaaaaaatcattgtttgctatgaacctaatcccatgcttaataattcccttctaagatgactccaggccaataaagggagagggaaatgataagggaactgtgtgaggccagacggcaggtgtattttaaaggcctaactgtgacctgtgggctttaaaggctggtgagagccttttgcaacccgtgtacccagcctgcagaggcagacgtacagccacggtagttcccctccatcccccggggcaatgcagaaccaggtgtggttgcctgctgcctcatttctttacaactgaggaaataatctttacgactataaaacaaaattgctcagctcactctaagttttcttagaaaaatctcatttttatccatatctgtgggaagctccaacttcgacctagaactaccacgctttgtctcactttgttggtccccctcccacacccaccctccaccgcacccccctaccccagggtggcttacttcactttaattattttccatcaatatttggaagagctgcttttgaagaaattcccctatttctctacccccaccagccccgccaaacatgttaatccatttatgcttctaaacccaagtattcatcccacacatcaaaatatgtgaaccttagcaagataaaagctgtccaaacctgattttgtttctacacagatggctataaacatgacactgggatattagtcttggcttttcttgacagacctgaaaattggccatgcagaactgtttaaaattggtaggaaaaacttaccctgaagtttactgttgatgaacacaagcgaaaacatgtaattaatggaaatgcatgtcagaataaagaaaaatgtgttatccccttcatttctgagtcccagccaaaggtgttgaataaagctgatatttcagaggcaaaaaggggacttgtgcttgttttagaaaagtaaaaatttgtatcatacttcatatgggcagtaattaatttatatcctgacaagtcctttaattaaaaatgttttaatacatttttaattacaaaagcatcaaattcacaacaaaaatttgaacactgtagactgacagaaaataccacctccattcaaaaagatatattgtaaaaaatctgctgcatagtttctgagatccttcacaacggatttatatttacatgtttgttttatatttgtgaccgctttgtagcccttttgtaaaatttaaaatactatgggcgtttttgtctttttgaaacagtgtctcactctgtcgcccaggctggagtgcagtgtcacgatcagagctcactgcagccttgacctcccctggcttaggtgatcctccctccccagcctcccaagtagctgggactataggtgtctgccaccctacctggataatttttttgtacttttagtagagatgggattccaccatgttgcccaggctggtctcgaatttctgggctcaagccatccacctgcctcagccttccaaagtgctaggattataggagtgagccaccatgcccagccaccttttttcagtattaatacatacacttacaaagtattgttaatgggtagatggcctttctttctataggtgtgccatttatttaaccaggcttagattattgaacatttaggtcctttctaattttgtatattgcaaattgtatttatcctgtcaaatatactcacggcaaaatttttatatatgtacccattcttataccctcaggataaatttccagaaatgaagtcaaaaggacaacatattttaagggattgtcatacatttggacaaattgttctccagaaagatggtacaaattgaccttctcatagcatggtattagatcatccattttctcatacccttaacggaactgcattttatgtttagaaaaaaattttttaataaattgaaggtgaaatggtattctcttgttttataagagattttcataatgtctgctctaaatatgaaaaggatgatcccaaaaggcttggttatgtttcctgaagagcacgtgcccaggaggctgatttgtagagaagcaatgtggtttttatgttgctgtagaatttgcacaggactttgctatgttcctgaagtccattcaatgtcaatattgttataccatgtttatcttcttaggtctataatattccatgtttatgcttccagtttggttttatgttaatcctggaaataacagagcaacagtatgcactatttaataggttgttttaccctaacccttgctctctgaaatcattgttttttccttttcatttctctatttctgcctagtacctttcaaatgttcaagatcctactcagaaagaaatgcaaagttcatagcggatattaagataataagtcatgtgacagaaaaacaaagcaggcattattttttaaaataattatagatatgtatgctataactaatggagaaatccctgtcttaaatcagaacttcaaaatagttctatcgaataagcacacaaagagcataaaatgtttgaagtaagaaaggcatttaagtagactagttgattttagttaaaaatacatagatatttcttcacctcactacttcctttggacctagatatttaaagggttttttttttttttttggctactggttttttagtactagaagatatgctgtagtgaaccctaggtaagttctaaccactacagaaagccctagtcttctgacaccttacttatcactgtgggttggtgggaggaaagtgaataattgttctgtaggtccaggctactattgagggttggggggttctaggttctaacattgtgtaattgtaaaaggctatttgcagttttggtgaaggacagagaaagaataagttaagagccatgccttgtgtggccagtagaagataatacgttcgctcaaataaacctgacctcttcagggttccagtcgcacctacagtgtatctggtactgtacaacagagaactgcaacctcagagtgagaagacagagaaatcacctaccatgcctcacagtgggaaaataaattggggtaactataaatcagtctcttggtatatgtaagtattcttgcttagtggtcttttaataaaggtatatctttcagtaaacgatatatgtaataatcccctaagaattgatctatgaaggaaaaagatgagctaatggcataccagttattaatacttgatctagtagatgtttaggtacaatgtaaatctgtaattccatagcagagaaacaaatctctttttctttccagtttgtgttaggatttattggaaaggggaacaacacctggatttaagagaaacttaaagattttaaagagactatagacatatgtagtcagcaaagaaaggggcagatgtcaatggcattttaaaaacctaagtgtagcaatttaagaaaagtagtggattaaagttggagaaattacttcatgcttgttccagatgactttgccatagctgagaatggttagaaaaatgtggtaagttggccttcttcagagtttaagggttgttaacctggggtccatagaccaacatggagtctgtagatagactgtagggagccaatgaatttggatgagggaaaatcactttaatttcactaatctttaagtaaaatttggcatttctttctattactaatgtagactataaccactgaaatagcagcagtacctttgtcaccaatagaaatcacatgtattttcatattatatttttgctgtcgtagacatcttggaatatcactacttcaaaatgtgtatagttattagaccaaacactagatgttatttaatacataagcaaagtacatatattactataagatgtttgttcgttttgatattttggtaacagaatttcagtataattgattgccggtataatcctaacattttatgcatttgaagacatgattttaagaaacattgtatgcagctgtcaccagactgccaaaagggtccagagtagaacaaagttgctgaatgctattcatagatggatgtttatttaaaaaaaaaaagggggatcaatagagatgagagagagctacagggaagcacttttgccatttaaaaatttccagagtcagcttaaaactcataggttagaaacttaaaagaagtcaaggtgtgggcagtttaattccattcttttaatatttaaattcccattgctaaagaatggctggcaggacaagggcttatacttaaacttctagccaacaggaggaaatattctgatgagataacctgtccttggagtacccacagagtttagagcctcatgaaacatacccagattgaaaggtaactcagatgaaaaaactatggaaataatttgacagcatttttttagtacctcccatgtcatcacaatagtgttagagcacagccctgacttccaggagtttactgtttcttcaggaaaagttaacacttactgaggacatttatgactacctattaacatgcacatgttaacagtaaataaggcgcaccctgagggtgtagctaaagacttggttaccttgggttgatgtaacttgagaaccagtgtaaatgaatgggggaatgtgaagtgtgggaagaaggaaatgtaaaaaggtgttccagaagttttagaataaagttctgcagcattgagctagggcagcagaaaagaaagttcaattctttcttttttttcgcttggctaataatactgagggcagattgttaaagccactggatacaggatgaaatgcaagaaagaaactgtcataggagagacccgaatagagcctctcatctagaaagataggtgaagtggtgagagtccatgttagagtaaggtggccatggcgaaacttaaaagaaacaggtaaatctaataaatatgaaggtctgacgaaggttagcagtgtgaagtgatgagtggaaggagataaaaaggacataagaacaatatgactggaatctgagaaatctagagggacaatgctatagaccagcagtcgagaatctgggtcccatatcctgccttgaccatggacttctccacccataaggcagtcaggtcacattttcacgcttcatttttcctctcccaagtggggcaaatatgtaaaactaagtaacatctcaaggagtttgatcttttggattgaaataaccttatcatcttttacaaattttctgatttctcagtaggctgaaaacaaaaacccaccatgtaagagaaaaacagaaacaaaccaaatcagagatacatgactcttatattaatcttaagctatgcaatgccaacctattatcagaactaatgtcattaatgttccaaagggtttacctcctcataatttcttttagttttccgctgagaatcatgctggtgcctaatgtattttagatgcagcatgaaagtctcaaaatgtgggcttgaaaactcaggcaaaattttcagtgggctactgaaggacattatgttcagtagcttaaaaatctgatggtctcttttaagcccctggactttgatgttttatgcctttttagttttattttctgatcatattttcctttataaatacacagggaaggatcacatcctgaaatctgtgattatcagaaatatgatagattctcctgctgccatttagaatcgggtgagtggttatgaggcacctagcaagggaactagggagttatctgttaagagacaatcataaaacacctgagaaataaggcctcaggtgctttattttctcttctttggggatgggaaaatgaggcatcttgttttcttctcttaaaaatatgttctattttaataaaaccaaataacaacaatctttactttccaagcaatcagatgttttattgactgtttcatagcataataattcactttccaaaaggattttgagttcccccatctgaaaagtgaattctgtactaatttttagagattaattgatttacccaaatttatttgcaaaataaattttataaacagatactttcttggttaaataaatgtgtatataaaagataaaagaagaatataataactgaaagatactgttgaataaagtcagcagaagtaatgatttaggaaatagtaatataattatacataatagtataaatttctaattagttacatgtaaatgcaattttaataaattatgttgccttttaaatacatttggagatgtatcatttagtagaacatagaaagaatccttttagaaaactaagaattattttttaatgccaatacattttctaacattcccttttgttaatttagcagttgaaaaatataattttctttaagcagtatttgccagtaaataaaataaagtaggtgaacaaacacgtatgtttcgactttatttggcattgctgggccattggctttattaggaagaggagacaatgcttaccacaccatgtagtttgtaaacctgtacttaagtggatatcatgcaactcgagaaatgctacagaagtatttccagtaagacattttggagaatatagagtttgggggagcactgagatgcagtaaaagacaagaggagtctgcacagtgagagttccgtgataatccgaggaccggctccccaaacaaggagcttttgtctgtagctgagtgcctggtcctgttctctcctagcctcttaaatagtttcattcttcttttgccttactttccccatctgtatttcccctacatatagtaattcatatggtttcaatttgaaaactatttttgtgccctttattcttctcccaaataactttagtctgttgtcaattgatcaagattgctatacgtccatatttagtgttgtctcctatataatataaaatagttttatgtcagtcattgtgaaggataaatttatttaatatcatactttacccatgacaaaaaaaactagcacttatgacagatgtagaaattccttaagatggcagtccagtgtccttatttaagatgtgatcatagatgctggaaccaactgtctagtgcaagccctagttctcacatgtaataactgggtgtctcagtaggttccctactctatgctcttcagttgcttcatctataacatgggaattatagtggaatctacttcacagaactgctgtgctgacttctggagataatttatatgacacacttagcatagtaccggacacttctcctcctcctcctcttcattgttgttatcaggccatcaaagaaactctggtttattgtgaacctatcactaagtatattcttcttaaagctctgatttcggtgtatacctgtagtatactatagtgtatcttctctctcaaaaggatttttgaagaagctaattttatgactcatttgggttggatcactttaatcttgaccaattaaaagagttctccaaatcataaattatcatataaaagtctaaatcccacagcttcaacagctatgtctgcaccagttacgttaaggagcactacagaacctcaaatgaatccaatatgtagaagaactctgcatcttgggcacaaatgtttgataaacctgattcaccacaccatatgatttctgttaccagggacattttgttgctctacttaaagattatctgtcttagtcgagtgtgttccctaaaatgaaaggttttaccctatcatgtaattactgttgtaaaaataaagccagatttgttttatggtttggggaatgcaaaaatataaggcacgtttttctaattatgaagccgccgtcaaacaggcctataaagcagatgcactttgcaaattagaagtggaatccaaggttcctatggctctaaaatgtctccttcttttgccactgatgtagcctgtggcactgaaagcaggtgtgatatgaacatattgtctccaagaccaaacttccctctgtaatcctcccagatgcagggcagatccaaatatccttcggcagtcatattctgggttggcaccacctgccagcaaagaatttgcagaaactcaactatggatgcttgatcgatctttcaaagctcccgtagacccaagtccccctgacataagaacttagtctaatttctcaacttgtcagatggttcatcttgagaactcttcctgcttttctttttgcttcttaattccttctgctgttagcagcttgtaggttttctgaaagctatgaaagattcttcctaattcagttttatcataaaagattttgttgttgctgctgagatggagtctcactctgtcacccaggctggagtgcagcggtgtgaccttggctcactgcaaccttcgcctcccaggttcaagtaattctcctgcctcagcctcccaagtagctgggattacagatgcctaccaccatgcacagataaatttttttgcatttttagtagcgactggatttcaccatgttggccaagctggtttcgaactcctgaccttaagtgatctaccggcccacctcagcctcccaaagttctagaattacaggtgtgagccactgcacctggcccatagattttttatgattaagctcacaaggtgaatcagaatagctgagggaacactgtcttgtttcctatattcagactggctgtctcagtaatgactgctggtagaatctttctcaaacctctaatctcttgtaaagaaatatactctacgtttgtcctcatcccccaaaaattgtgtacttaaaagcacatatattgaaatatctttcagtttctttttgagactgaatgtcaggcttataactaaaggaaactttctccagttctgttttcctttatgtagaagcaatataatgacttttgtccatcttctattaaatagagtcacttagacaagaaccgtctccctgaccatgaaaaatgggagggaggggattaaattctatttgtagttgaatgctgcttatgacagtgaggaagaacaatcaatataagaagctagtacagccagaacatggtaaaaaagcacctcccttcagacagcaaccttcaaatactttattctaactgctgatttccatgctggtcaagcaggatgaggttctattgttacgtcagcacacacctgggaaagttgcctgaaattagtcagcgttggatgagtagccctgattacattttgtgtgctcagctcataccagtgaccttgagtcaaagcattgcttaataagagtttgtagttccagatcccacatctcatcgctccttccaccatctactataaagttttttattgttgttttccttaatcatacttgaaaaaaagatataaagtatgtctttgataaattttaggacattgacttcttgaccatggtgtggatgctaattattaacacctgattaggaagtaccagttcccaaaagtgggaaatacatcttcctttacagctaattgcagaaatcagtgctttaattttgttgaggaagttttgccatgaaatgttttgttgagatgcagataaagaatttgtagaagcaaggagcacttttcattagagaagaagaaattctttgggatggaggtggtttgggaaagtatcagcaagatgagaaggccataaaggtggcaataaaacccaaatgtgctgagatttacaacagaccccaaaagacaacatgaatgtgctcaagttatcccacctcagtttttgagatgtctctggaaaaaatgcagattatttatataagttcaaagcctcataagaaaatcatgagcagaaaattcctcagtatattatttgctatgtaaaaaaaggcagaaaaagatggtcaccaaatgaagttttagagtcttggaccacaggaagttttctaatcctggcatttcacaataatgaagacctccatctgttggtttttaaacactgaagtcagagctctgcattttgttttgtcttcagtggctttcagtatttatacaaatatatatataatacttactgctagatattctggacagtgtccacatctggacactgaggatttttgacatgtgaaccacttgctttgaatctcctaattgtcaaggtgagtgagatatatagatttggggggtggttggttgaggctttcagagaaggataataaaggtgtcaagaccaaacccatgtgttttgctcatctaagagagccacttttattttttgaatactcaggaaccagctattaatattttgcagcaataatgagcttattataagtttatgtacatgtaatcccagttacataagacctgaagagcaaaacccccaatccacatcaatcccccatgcgttgatgtgagccagatggagaaggggttgtagcaaaacaccaatgtctttgacatttgcagccagtttccctggctttctctggatccaggtggctcaggatgagctcacaaatatcatcctccatctattcattgctttcgctcattcattcatatttattccaaaaagatttattaagcacctactattgtccaggcactgtactagcaccagagatacagtgatgtgcacattaggcaggcctctgacttcatggtccagaggtttttggtgaccctacatccctgttaggaaggaaaaacttgggcagaactcctaccctgagcagatctctgccttcctaccacacacgttgtggagggaagtgcttgttaagaacatgatgacttcattttctctacaactgtttcttaagtgcagccacagcttcctgaggagcaagtttccttcacttctccctttgttttaatgacaacttatcaaccctggacagctgtccttgcctgtatgggactacaggtccagttttacctttactccctcactgcccactcttctcgactttgctctgtacttttaggtgacttaaactgtctgccaatgtccatcatgactccttgtcatgcaagcctagcctgcacaagctccacacaaacaattatactaaaccatcccccactggttggactagagagtggaaaagccatttgtcttgggaagtgcagagaccatttgtcttgggaactacaagattctggcagtacgtgggcggtaaaagctctgcatccccactactaaagccactgactaccatccaacccctaaagtgagcaaaagcaaagcagaattcctaaaaggtgccttcaacctcaggtagtgttctaggcctttcagtgtcttaccagcctaatctcagttgattctcacaactgaattcttatagaaaccatgtgtaggaaattttccatctaccacatttaattaggtatgtccccccaaatttcacctttgtgtcatcactgcagtttacctaagcacagtcaaatctcttgatctcagcgtattatcctcattttcttcttgagggaaacgtatgtaacataccctttaacttggaaatatgtgactgccaagaggaagaatatccacaaggagagaaagaacaatctgtggcccagttgcttagagtatatgtgcacattaaaagaaaccatgtgcatcttgagaatctcttactccccagacacccttacctggtaccttgtcgcttgttttatcttcacaacattgctgtgatgtagatggagctgaccttacactagtttttacacagaaaagtgacagcatgtgggatgaccgctgggagaccagaaatatatgcagttaaatgacattaacacaccttattcacaccccaccccctccaatttgatgtggattaaatcagtggtatgctcttggactgggtggctcagaccatggaccactaggaaaattatcttctgtattttcctccttccagtgttttttcttctccctaaaacaaaggtagctgactttatcacatggaaaatcatgtatagtcatcaattacacaggtatttaaaagacccttgaaagttgctaaaaggaaaatgaagtttgaaatgtggtccctgtccttgagaagcttcaaacttaattggagaaacaagacacaaacatattaaaatttaagaggcgaagcagagccatatgtgattgagtgttggatgactcagtgctttgggagttcggaggaggcaaagaatgcagtgggctaaagaagaggtgggatttgaccagactatgatgaatgagtaaaattgggatgggctggcagaagggcatcctggaggggacaactatgtgagcaaattctagagacagagatggacaaggtattttggaagacagtaaattaatgaaatacataaataagaatttgcatagaggcaggaaatgcatttgagccaggggactaggaagtcttaaatgcgaagcaaaggaatattgttttgatggaaatgtaataatcctttaaggctctttttagtaagagaataaaacagagatgctaattggacgaaactggccatgctgtctcaaacctccgtgtttttcaaatattagaatgtatgcctcaaatctcattttgtcacttctcccagcagattactatgttttcttcagtaactcactcagtgctgtgaaaattttgcaaacttacctagggaaagtttgtttctcacccttttgagtcctgcaatgcttcagacacatctcgtagaaggtaaagcttgtgtgacttcctgcttgcataccccatttatagtagtgggcttggcacatggaggggtcatatcaccagactgtatgtgccaatgtgagcaaattaaatagcagcacctatcgtttatgaagtgttttctctgtatcaggcatggtactagatacttaacatatattattaataacatatcacctctaatcctctcaaccattcaaacaggtaggtattaactctctggcggagctgaagaaattaaggtttgcccaaagtctcatagctattaaagagcagtgatgttgagctccaaagcccatttcttttgcctctactggttattttaacatcttttaaaggcctaaagcacccatcatagtgcatgatacatgggaaatgctgagcacatgttttcaaatgaaagagagtaaaagcactagagaatactgtcaatgggtggaagacataagacccaaagacctttagttggatctgcagagccttgcttctgccagtgcgcatttgggggaaactgcagatgccagccagccctgagtccattctcctgcaatgggcaacaataggagtcctcacaagtcctcaccttttctccagccttcttttctgtacagtgaggaaactaaactaaatgatttctaaggtttcttctaacgtttatattctattctaacatctaagaaagtagcatatttaaattaatttacatgaaaagacaaattattaggagtccttacttttacccttgctcagagtttttacaacttaaaagggacatttgtcccttgatgttgcagaatagtaggcaatgtgagtgaacttgtgtacagagatgcttcctagcaggttggtcccatgccatggttctctcaaagctgacttaggtgcccctaccaccagcatcctgtgcatacctctctcaacacacatcacaccacataataatcattcattatcaggtgtactttgtccattagactagggtatcttcaagggcaaggatctgtcttttatttctgaatgccatacttctggcaccttcttagagctaaaaaagtaaaaatacagtcatccctcagtatttgcagggggattccaggaccctttcagatactaaaattatcaggtgctcaagcttcttctataaaatagcacagtatttgtatacaacctacacatatcttcctacatactttaaatcatctctagataactggtaatacctaacacaatgtaattgctattattgtttgttgttgttgttgttgttgtattgctattttaattgttttttccccaaatattttcgatctgtagttggttgaattcacagatgcagaacccacaaatatggaggaccaactatactgtggttgaatgaatatctcaatttatggtctcaaacaaatcttttcaaaagaaagtctcaggatcagcttctttcacacattaattaccttatattctccagaaatgatgaaagagtcctgtgcacaactttctgcgtctcccttccagtcccttgacttagtctcgctgcctgtttttctgggatccatgggaccccagttccagacctctgcctgcccagcctcctgctggcccaggaagaagcactgatgctctttagttctcagccctgagaaaaccacactgaaggtgggcctcaccttcacagaaggaccgactgcctcttggcagtttggagagagttgcgggatttttcagcctagatgtaacctcttctctgagtacccctgctctgtaaaatattttaatcatattcttcatctcgttagtggatgaaagtcatcccaaatggtctgaaggcctcttcattccccatgtaaaatgtagctggtgtttcagggtgagaggggcagtattataaggggaaaagaaaacacacaggagcaccttgaaagccataagagaaaggatttagattgcacaggtgaagttctaaaggagaaaaccatgccatttgcctaagattccatctgaaaggcaaaaagaaatgttatgccatgcaactgattagaagttaaaatatatatttgcctccaattttttcctcaaagctaaatttctctggatgtgtacctgattagtgacagtgtcagagcttagaacttaacagtgatcatggggcagtagttttgcttccattctgttttgaatcttttattgtaaaatatatgccttatgcctcatttgctgtaaaatctattttattgtggtacttaattaatgatcactttgaccatttgtggcaagcggccaaaaatttatcttctctgcctcttttttttttaactgccagtgtttgagaaaagcagattaggtaaagacctatcaatctgccttatccattaataaactggagaaatcggctgtaatttcttcttaaattatatattaagggcttctaaaaataccctttgttttgaatgctgaaataaaatgctgtgaaattcaaagttaaagtatattacatatttatgacttagaacatatgcatgtaaaatttttaaattgttttatgatttgataatgattagaaagagaaacaaaagggaaaaagaaagatggaaaaggtaaggagggaaaagagaaagaaaaccttgatgcctaaatattttaatcagttgcacttctttttttttgagatggagtctggccctgtcgtccaggctggagtgcagtggcgcgttctcggctcactgcaagatccgccgcccgggttcacgccattctcctgcctcagcctcccaactagctgggactacaggtgcccgccaccacgcctggctgattttttgtatttttagtagagacggggtttcaccgtgttagccaggatggtctcgatctcctgacctcgtgatccgaccgcctaggcctcccaaagtgctagattttaagggactccaacattgaatcctatatagatagcaataaatgtttgtcccaagtgtaaaagattcactaacactttacgtcggtaccaatgtagaagtctaacatttctttccttcccaaagagcttacttttggtaaacaaggaagtgtacgtgaaatcaactgtttcaagcctttcagaatctctttatgacttggcttctactgtgagacccaccaaaggcctgctgcttgtgatatcagagtgtagcttgcagcccataaatattgaaagtgcagtttgtcacttgtatttgttttacacttacaaattaggagacacatttactataaatatagttagcatccagaggtttcaaagctaagaatatgtgcgttcaaaatgtctgtttgccttatttatgctgtggctaccacatttgtataaacagaaaattactccattcatgctttattgcttcttcttttgtaccacagccttgaccccagtcatcataaattgagaaatagtggggaactaatggagacagatgggaatatggcttgccgtttactcaaattggtaaagtaattaacctcaaggtgctggtttgcaagaaaaattgttggaatatctcaggacatcggtaaagagactcctgctttaaccagttctgacaactgcatcataaactagacttattctgttcaattgacctgtcaacatcttgagtccaaataaagatttgtattacaatgcacttgctgagaagtgggagaacaccactgctgtttcttttcaaatgggttgctgttctctgcctgctagatagtaactggattgtcatatattcattcttcagccattatattccttagaaatcttccattactgattgtgtgacagcttcgtgacagcagatggtagtcatttggctccagaaaatgaaatgaagaaacatgggccaggctggctgggctcatttagaacagcagtggacaggggccagatctagattttatttatccagggacatcctgtgatgaagccagagttgcgctggtagtgtgttgttccctccagattgcggggtgggactggatttctgcagatttttatataaatcaaaggcggtcttgtaaatagggccattcgatcaaaccaaaccaaagtatattccttttgaaagctgacagatttcacttattccaaacaggtctctctccttttctctttctcttccccttcactagttcctaggagtagcatgtagatttctcttttgcactttatcagctgtgagctactttcacagccgtgagctcaatctttggagcactgtagcttccccatattcagtcgtaactgggagaggtttgactcctgtaagccagtatggctgctcatttcacgtatttcagtttgcagttgaagcagatatttttaaaaaagaggaagaaagctctttgtgatatcaccataaaatttatctggaaggcatatgtcatgggaacataaagagtaattttcgtctaaagtaaatatatccattcataagagaagaaaactaaaaatgtctcatggcatctcaatttgaagaaaagtcagttgatttagaaacaggtttagctccagattgccatgttgattttcttcatacatatacctgtggaaacaatattcacaaaatgagcaaaccctagcacattaattccattcccagagggcagcagttactcgagagtgggaaggctgtgtctaggcacagggtggaagtattgtagccatgagtttcagctgagctggccggcactggcctgtccacctagaggtgatcagctgagaagactcaaaagtatctggttttttaaagggtaaattcattactgccttgaattggaatttttcatgtggacctgtttagaagagggactaaataattacctatatactgtcttcaagttttatttttttaaaaagcctatctgaaaattcatagaactcttcattttgaaaagtatacccatgcttcctccaaagttgctaaatttctcttaattctgttgcagtctctggggattaaaacaatacccaatttaagacaagctagaggtcaggttctttctaatgctgtgatttcatgagtggataggaagtcctttctcttgaaaaataagttactgctattgaactcagtaggaggcacattctcccttctcacccaggagtcttcctatgaggctaacacactcatcttgattggaatctcctttacccagacccatttcctaatcctagttgccttttccaaagaagaactaatgctgacattccagtttttccatcctgcccagagctttccatctcagtcttccaacaatgctcttcaaaaattggagtcttcagcctactaagtatgtctttgtttctttgactttgtacctgatatttttggtttcacataatggtgatgatgtgtgtatatgtgaatagttttaataagtcatcattctattttcatctgatcaagtgtctaaaacctagtgccttacaatcagagtaaactctctcaatccgagcagtaggctttgaagaaaatgctgtgaattcaagggggtcatatccaaattgatctctatagaatgaattccaaaattacaaacttgcatatgttaggctactacttatttttaaaactatgcatttttggtgctgggactttattgtatgctaacttcaaattgaaagctacatacgtttgggtttgggttttgtggccgatggctgcattatcttaaatgggtgatgacttcacagattacatcaaaaatgctttcagggtgtcttttgcctgtgcctatttccatcattaaattaaccatgagttaatgtgtgactgttaaagaaaacacaaggcagcattttgcagtgatagctaatggattagaatggcattaaatattttcctcctggcagacataacattttatagtttggctttaaaataaaggctattttatatacactgcaatttcattcagttatttctcagactttggcacatccactggctagttcaaactttatgtcaccaacagaagagagtgcatttaacttattgcagtctcttattaggcacatgttttttttatcaggcactagaagctatgggaagaatcaacccactctcaagtgggcacatttccatatttttgcatgtccgtgtatctgtctgttatgtttatgtgtccgtatttatttgctccccaacctgtaagaagttgaaccgtttaaatccatttgttacctgaattgttttctcctgttttgaaacattttaatttataatcagacaagaagaacagatgtaagagttgtaatttaatcattttattgctatctttgtatattttgaagaattaggtattgtactcatgggaagtcgtattttatgcctagttggaaaaatgaataatgtaataatatgcaaaatgtaaagttttagaacttcactactgagtaaggcatataaactaatgatctggttaaggtcccctgtgcaccataataaatatggactaaatttgtcattatagctttagacagaggtttcaggcaacagatttaattaaatccttttttaatattcatacttctaaactgcataattcccttctactgtaaaactgagtgctatattaaaacaaacaaaaacggcagattactaaatggatattagcgtgaagtcaataagcatttaattctggagagaactctgtgaggagagaggaagcttcatggagctcattcaggagatcttgacttagatttgggaagctcgttcaggagggcttacttctgttttcatgctgactcttgtaggggaggttaattagttaattttggaactcataaaggacaggagcaacaaaagaaggccctttgttagccttaaaacaagtgatggttattaaaaatctaattcaggagtccatgagaaatgtgttgatgacactgaagaagtgtagaatatctggatactggtaacttttagaaaggttaaataataagatccgttactttgtaaggtcttgtgcccctgtgacatccagcccaggcactagagttcctccaaaaactgtaataactccttctggattttgcacagaacaaatctagatgttttgttcccttttgtgtgattaaaagctcgattctgaatatttccatgtgaacatttcttcgatgaagagtcatattatccacagaataactaaatattaagtctttgaaaaactgtttgactagtgccattagctgactttatgaccatccttgttaaataaccaaatcaaactccactcccccaaggtaattacttgggtcaaattgccaatggagtctgtaagtctgcttagaatctgattaaatattctctttatgcattttctccacctgtgctggatttttgtagattcatatttttctgccccttaaccagttttctcctgataaattaagagctctctgtgcttggcatagatttgggatcaacaaatgtaaactgaatgaatagaattgtatatagaataaatagtattatgaattgtataataaagaaccatgtagagcaggtgacctgaccccctaattgtacagattaaaaaaactggactgaaaatagtttaattggcttgcccatagttataaaataattactggctaacgatgacacaggaagtggtgactaccttatcaaacacaagatatataaagaaagataattcatactctttgtcctcaaagtaactcacaggtccattaataagacaatataagcacagaaacaataattccaaacagcataagtctaaacaccaaagatacactttagagttaaaccatctaaactctgaaacagcataggaaaagagcaatgaaggctgacctgtctgggaaaagcttcatgggcagtggtttgctttaagtggaccttgaaggataggagaggtgaggccatgagcactgcattctggggtaagcagacatttttttttcaaaaggttctaacagtggagcagtgggagaacagaaacatacgtgcttctgccccagccagcacttctcctgaccccattggctagcacccagagagaaaagtgaatgtctcctttccttactatgcagatctggttccaagaaacagacagactatccattcagaatttatgtcgtgaaacaagttcacagttgataatatggtcctgaagtcaggagaaatggattcattttcattttctgggactacctttgaagttgttgagggaggataattattttcccgcttcaaagtattttctcacatcattttcttggaaatgacaattgggcagtgccccaggttggcaaatccaaccttagtttgatgaatgcaattctgaacacagcccttgattcactgttcgttttcatggctcaaaatttagctttgcaaggtgaattgtcatgtatttttggcaaaccatttcttccctcaactttaaaaccaaaagaggacataggtagtcctagaattatttaaactggaaaaccagcttggagatagggatctcatttaatttgatctcacaaatttgagtgagaaaattaagacatccagagctcttaatgacagtcatcacattggttaagtgacttaaggcagatacaggtataatcttgggaactaaaccaaaggcatcttctctgggactagctgaatgtgcgtgctcaaatactacaactatttctggaaagtaacttagacttaatactttatttaaaaaatattcatattttcatcattatcaatgtcttttagcggtaaatatcctcttaaatgaaagtttgatccgatctgatttggagtaagcatgaggacttcttcctctaaccaagagtaatagggtttggatttgccttcccacctgaaaaattagaaaagagacagaagatattatttaaaaactgatttccaagctactagagatctggtaatgaaggacagtgatcccagaaagacaggaaacaaaagtgagtcctacaacttttccagctcacagggagcaggttcctgacagagcctggaggaccccctgagttgagaaaacagaaccgagagtgtggggagacctcgattagctagaattcaaggggcagagatgagagctccacagagtgaaaattctagaaatttgcagagggttgcccctaagtattcagccgagcactaatcagtgcatgagtgtgaaaaaagcaggcaaggctgggggaagagccatctgaaaggatgaaaggtatagtgcccagcactcaaatagacctgaaaacagtgcctgtttccattagccagactggaaaccattaagactcgcagggcattgggtagggtatacaaaagggtcttgtcgagcaagtggcttctgttgcctgttatcaggagtagaagtctgagtgcttctgtgcactgcatcttgctatcagagttgccaaggaaaacacagcacattcaagcactaggaacgatactttactcagtccctcatggtgggtgggtctctcccagcaggcatcctgcacgcactcacctcttgcgctgcagcagaagggcccacacccactgttgaagctgaccttgctctgcctcttctatatgtgagtaaagtttttttttcatccagtgcttaatggcattatgggtttgttggtggtggtggtggtttgtttttgttttgtttcatttggtgactcagataaatactaagttacagtggacaaaaatattcagacttatcctgacagtagataatagatgccacttattcagcaggccttgattcagtagtggggaataattagccctggtctgagcgctgtttcagtcccaccttacaaatctgtagggtgggacccaaaaggatcaaaatacctccaggtaacttgactgcatcccacaacaaatctcagtgatatttcaggaacagaatacccatgatccaacaatgtaaaattcacaatgtcacttccaatcatacgtaccagatgtggaaaggagcaggaatatataggctacaatgaagagatatgttaattactcaaaacttactaagaagtgacatattagaattaggaggtagggaagtcaaacttgttattattactacattccacatgttcaaaaagttcaatggagacatgaaacatgtggaagagactcaaatcctaacttctacagataaaaactgcaatgtgcatgggattaacagtgaattagacattgcagaagaagatattagtgacctaaaaacataccagtagaaactatgcaaaatgaaatacagagggaaaagtgaacttaaaaaatgaatagctcatcagtgagctgggggacaacttcaagtagcctaatatccgtgtaagtccctaaaggagatgggagaatgcaaaaaatatttgaggaaataaggactgaacatttttccaaattggattagaactacaaacctataaattcaagaagctcagtgagccccaagcacaaaaacaggaagaaaaccacacatattataattaagttgctcacaatcagtaataaagagaaagagcagcaagagggaaaaaggacaccttagatgcagaacaatgagaaggatgatagcagatttctcataggaagttgggaaatatattgaaaacactgaaagaaaaacattcttaacctagaattctatgccaaatgacatgatactggatgtaaatattcacaaaagaatgaagactgtcagaaacagcaacgggagtgaatatattgaaatttttcttactgcttaaatctctttaaaagataatagtctgaacaaaattaatgggaacacagtgtgggatttgcagcttatataaaagtaaaatgcatgatgaaactagcaccaagttcaggaggggaaaaaagaagtatgctcttgtagggctcttttatgagaaccggtatgctatcacttgaaggcagactgtgataagttaaagatttataatatgagccctaaaacaactaaaaaaaaaacaaagagttatagctaataaagcaacaagggagataaaatagtgacattgaggaatgctcagttaatctgaaagaaggcagaaaaagagaagtaaccaatagaaaacacatggcaagatgatagatttaaacctgatcgtataaataattatattaattgtaagtaacctaaattgaaactcaacttaaaaagcagagattgtcagattatataagcaagcaagacccaatatgtggcctacaagacatatttcaagtattaatatgaagacaaaataggtttaaagtaaatatatgaaaaaaactgtactgtgttagcactaatagaaagagtagctatgttaataggaaacaaagtagatttcagatcaaagaatataactatggataaagaagttcatttcataataaaaaggaactatttcataaaaggacacccgagtataaagcagtactgctaaaatgcaaggaggaataaaaaaaattcacaattatagttggatattctgatacccctttctcatagacagaaagtcagtaaagatatagaatctttaaatagcactatctaccagcttgacatttattaaaaacaaaaacaaaaaatctccacctaacagcagagtacacattcttctcaagtgcacataaaacatttaccaaaatacaccttattctgagccataaagtacatcttaatgaattttaaaaggtttaagtcatacaaaatatgttctctgactacagaggagttaaactagaaatcataacagaaaatcattctagaaaagcttcaaatatgtggaagctaaataacacaatccaaaattactcatggctcaaacatataaaaagggaaattaaaatgtattatgaatgaaataaaaatgaatgtaaaacgtatcagaatttgcagcatatcactaaagaagtagttgggggaaatttacagcactaaatgcctatgtttgaaaataagaaattagcatctaaagaagctagaaaaagaacaagaaattaaatctaaaatgagtagaggaatagaaataattaagattaaagtagaaatcaatgaaatagaaaccaatagagaaaagcaatgaaataaaaaagaaacttgttctttgagaagtccaataaaaactttcagctaagtaggaataaaatagaacttcctcaagttgataaaggacatctacaaaaaaccctataactgacatcatactcagtggtgaaaaacggaatgcccttccgccatcagtattttaaaaaaagaaagggatgtttgctcttgccgctttaatgtgacattgcctagaacttctagccagtgcaataaagcaaggagaagagataaaaggcattcaaattaaaaaaaaaaaaaaaaacacaaaccttttatttacttaaaatatgatcatctacctagaaaatctgattgaatccataaaagactactagatctggttgaatccacaaaagactactagaactaataaatgaatttagcaaaattgcaggatacaagatcaatatacaaaaatcaagtatatttttacatatgtagcaatcacaagttgaaaagaataagtcagtagcattgacaacagcattcttaagtacttcaacacttaaggacaaatctgacaaaatatgtgaaagacatgtacattaaaaactatagaacattgttgaaggcctaaataaatggagagatagataccatttttgtaggtcagaagactcagtaatataaagatgctatgtctccctaacattgatctatagattcaatacaattccaatcaaaattctagtagacttttttatacaaaatgacaaactgattctaaaattcacaggggtatgcaagtacctagcatagccaaaacaatttagaaaaggaaaaacaaagtttgaggactgacactatctaatttcaataattattaaaaatccacagtaatcaagacagcgtgatattggcataatatttgacaagtatatcaaaggagcagacccacacatttataggcagctgactttcttttattattattattattattatttaagttttagggtacatgtgccaatgtgcaggtttgttacatacgtatacatgtgccatgctggtgtgctgcacccattaactcgtcatttagcattaggtatatctcctaaagctatccctccccccctccccccaccccacaacattccccagagtgtgatgttccccttcctgtgtccatgtgttctcattgttcaattcccacctgtgagtgagaatatgcagtgtttggttttttgttcttgcgatagtttactgagaatgatgatttccaatttcatccatgtccctacaaaggacatgaactcatcattttttatggctgcatagtattccatggtgtatatgaggcagctgactttcaacaaagatgcaaagatagttcagtggagaataaaaatagtcttttcaacaagttgtgctggaacaatgggatattcattcatatgcagaaaaaaaccctttgatccataccattcaccatataaaaaaattaactcaaagaggatcatagacctaactgtaaaacctaaaactataaagcttctagaagaaaacgtgagaaaacttttgtgaccttcggttagataaagatgtcctaattatgacgctaaaagcattatacttaaaagaaagaagtgatgaattggaccacattgaagtttaaaacttctactgttcaacagtctgtaagtgaaaagacaagccacagacaggaaggaaacatttgtaaatcatatatctgacaaaagactttatcctcaatacacaaagaactctcaaaactcagtaataaaaaaaaatttaatgggcaaaatatttgaataaccatttcaccaacaaagatatacagtaagcaataaagcacataaatgatattcaacatcattagtcattagggaaatgcagattaaaactacagtgatattccactgtgtacctattagaatggctcagtgttgcccaggatgtggtagaactagaatgctcatacattgttgagaaaaatagtttagcaattttcttaaaagttaagcatatgcatactatatgacctagctgttccactcctaggtatttaagagaaatgaaagcatatgtctacacaaaaatttgccaatgaatgttcacagtagctttgtttgtaatagtcaaaaactggaaacattccagacgtccattactaggtgaatgtggtatgtacacaaaataggatactactactcagcaatagaaaggaataaacttgtgatacacattacaacataaatgaatctcaaaacaattattcttggtgaattaagccaaaccaaaaaaaaaaaaagagtgattccatatatataaaattctaggaaatgcaagttaatatgtagtgacaaaaaatagattcagtagttgtctggggatggcagtgggtgatggagagagagatgcggtcttagaaaaaggcatgaggaaatgttgagggagacttttgttcattgtttgtgattgtatagaggcttcacgggtgcattaatatgtcaaaacctgtcaaggtagatactttaaatatatgcagcttattctttgtcagttgtacctctaataggattgttaggaacatgtattagtccgttctcatgctgctaataaagacatacctgagactggtaatttataaaggaaagaggttcaagtgactcacagttcagcatggctggggaggccccaggaaactcagaatcatggcggaaggggaagcaaacacgtccttcacgtggcagctgcaagaagagtgaaagcccaccaaagaaggaagccccttataaaaccatcagactgcttgagaactcactatcatgggaatagcgtgggggaagctgcccccatgattcagttacctcccactgggtccctcccaccacacgtgaggatgatgaggaactacaattcaagatgagatttgggtggggacacagccaaaccatatcagagcatttaatggttaactctgttgacttagaaaaatctgaggacatttagaaaaattgaacattttagataacattcccaatgacatagaataagctattttgaacattctttagaaaacctattaggttcactttacataacggacatttgactgtagcctactatctagtcttatgttgctttccagtccctttcatttaggcagatctttgcattattttatgaaagcaatatgtgtgtgcatacattgattttagtattaggcaatatctacttttaaagtattgaaaaagtgagttaggatcacagttttatagagtatgcagatgtgaggatgtttctgaaatgcagactagatatgctcaaacgtggttatttatctctcttgctttcagttcttattataaataatacagtgaataaaagatggatagcttctaactctagaatgaagagttcaggcttaagagtgagagctatcactggaaaatgtccttctcaattcagaactacagcacaattcatgttgcagaccaatgtagtgggacccagtttccacctatgttcacggtaagctttttttttaagtttagggctacacgtgcaggtttattaaataggtaaattcatgtcatgagggtttgttggacagattatttcatcacccagttattatgcctagtatccgttagctttagtgagaccagtcattgagaattcagcttagaagcctattgaaaggatgatgattctgctacaaatgttccttccccttggtgatttccagtgcatgctatattcaagtcatccagtcacaaataacctcaaatggaatcacccagacatacggtgcatatgaaactaaagaaaaagttctcaaggtccacacccacagcatcctacagggtctaccctggattaatctagtctcttctgagactacagtgggaatattttttaaatgttgttcatctttgctgtatccacttgctgcaagattacatctgttcagtttcatttcggcactgaactttccctgcctgcaaactaatcctcctcattctctcgttaaattattgtgattatttaaagaaaaaaaaaatgtgctttttctgtccgaattttcctctttataaaaaatgctaatggtattgaccacatttactagacaaacagttgctaacagttttcaggcatgaatgtttttgcggaggggtgttgcatgaatggcaccaaatacaaaaatgttgttggtgttctgaattcatcgtatgagagaccattggatagacttgaaggatgcttgctgctgcttttcatgagctgctgtctcctctatggactttggaaaagattttgtggctcatgggttattccctttttccttttcaacccaaatgtatttgtacattatcataggttcctgtcttaattcataaaggtaaccagatttttgttccccactcaaaaaaaaaaggacgtgaactgatgaaagcaaactaagggggctatattctcttctcggtgggcttggcaacattaacattaatgggagttataagtgcatcaagaagcaagttcatccctaagatgtaagagctccagccatttgaaattagcctttgtgggtctcctgtgttccgcagcaccaggggctaattcttattctttttcatctttcccctttcttcactgggcactgatgcctcattacacactgttcctcccattctgcagcgccgagtctctgactctgtctgactccaatcaggagttcgcaagcatcatcccccagatgtcctaatgccagctgtgggggacattgttcgaagctggggttttaaattgttcatttgtttatttaagtctttatctttttaaccaaatgtagtgttacctaaagagaaagttaacagagatctcagttcaataggagggttgttgtctaatcttttaagtcattttctgactatcactaacttagtgacagccacttgctttacatttccaattttagtgacaggtcatagtagttcctcccaaaccagtgttggaaataagtctgggaacccaaaagaggaagaaatgagtttaaagaatataaattcattaataaaaaggaaaaatatatccttaattacttttgtctgccagtcccaaggtttgtcttcccaggatagcatatgtctgggcagaaagtcaactatgcctctcttttgagtatagaatcaggagataatttcatttgcctggcctggaagatgattttcatgatacgcctctccatcatctcctcattgtgcaaagtttcactggcaaactaccctgcacaagcttacaaaataaagtttttccctctccttttttttcacaattttgtgaaaagtgttgttctttttcaccaagacctacagttagaaatgctcttgtatgacaaaaaaacaaaatctctttatgatcttgtttttcagtaatttacaattctctcaccagtatttttaaaaattttaaaaaatgaaactcttggttgttcatgttgattacatgtgatccatgaaataaggatcaaaatagcaatgtagcttcaaagaaattttatttcctatttcagtagctttccaaatcttggtttgtttctatcctaatcccagtatcaaacttaacttcatttgattactggggttagtgactctgaagctgaataacattttctccaaatattgggtcataaattagcaaggagctaggagaggttgaaaacaatactgaattttaatgaacagtttggatcagggttgttctaaaaactttgcccgagaatttaaggcaacagaacacaggagcagcttataattgttttccagttgactatcgctgtttttctcttcatccactgtgctcttgaaacagagtgagatgtatgcaagaaacgttttacatggaaaaagcatgcatgtctcctaacgttcagttcataactgctgcattgtgccatcttcatacactggactctttccttcctacatcgttaatgtgtttgagtaagtggtatcctaagagtcaaaagaagccgatagacctccctaagaatacagagctatggctgccacacagcaccaggattattgtaaaaaattaaatctttatgaaatagcacatgttaataggttttgtaaactaccaatggcagcatagagcaagtactattaaaagtagggtggttgttatctggtattaggaacactatgagccaaacagaccattctgtggttgtgagttttgcttttgtttgttgtcattaaacacaaacatctgaatcttggatgacaacatctgaatcttggatgtttcatgagaagagaaaacgtagaggaagaggtgagatgagatgcctacttttgaggggcagttaggggcagtcttagaccgggggagctaaatataaaatgaaaggggagtcttacctccagagcttataatgccctcgggaatgctaactctaacactactgcctcaaggagataccagttattcactcacagcatgactcattttccttgaatacatattttccagttatttgcgtgaactagaagtagttgtgaaaataaatttctctgttcaaaacaaagaaggctaattttttgcctgtaaaaattgcttcatcatcaatgttttttagtgttcaagtaaaattggccacattgtattgctgttttaaaatgataaatgagatgattatcttacttttttgtgaaaatgtatttaactcatcattttccttaatataatctattttaaaaagcttcaagggagaggaaatagattaaaaataaatgaaatcatacttttaaaaaattaaatttgaactagtgaatacttgaataaattctatcactccagcagagacgggaaactgggcagcctggccctgcagatgctgagtggccagaggcctctgggcagggctactgggatctgccccaggtgacaggtggggccttggggtacctgcagccatagccactgtccactagtgtgctgctcctctcttctgaggggtctgctagctctggaaatctaggaggctggcagggagaaacagtagaaattggtcagaaggcccctgccggggagaatgaaaagagggaaaaaacagctcttgttgaatctggagaacagtgatgccccactgttcagctgatctctctctttccattcacatttgcgctcaaagtgtttcaacacatccagctgagccccttctttatcatcgcccacattctgcttccccacgccctgaaacctgttgtcttttctaccctccacaggcacagacactgtgttcacctctccagtcacatcgacgtccaagcagatgttctgtggcaaagttacaaagcatttatgtcactttttaaaattaatcaaattctcccttggaaggagtttagttcctctggctttaaaagatattattgctgaaaaataaactctgtatacttgcttttaaagatctttgtatgccttttgtaggttcagagtgaggggtgctggaggacttttaaagtgtggtattttaaagatgttcttaattgtaaagagcaaactttacatttgtgaaaaagcatctcaaagttagaacatatatctcctaagactagctgacctccctcccgtaaactggtgatttggagacttcaaaattctgtttatcccatagaaacatgtgtatcctaggatgggaaatctgaggcttctttctctcataatttttaataaagtggaatcactagagaaagtaccggggtttcttaactttttaaattgtttttcgttttcactttaattgcataaaaggggtagaaaaattccatcaaccaaaaaaagaaaaagaaaaaagcaagtttcttatagcttgctgtttttatgtgtttcatgttttataattcctgatagagatcaggtagtaatgtaaggtaactgaaaatttaattcaacatgtatttcaatgagtgattactatgttcaaatcagtggggattcaaatatggataatataaaagacagagagattgagtagcccaaattcacacagctcatcaaatgggccaactggagggcacctgctcctggccctacaaaccctgcctttcagaagaggagttaccctgaggccatttagaatctatggaactggaactgactccagaggaaacagatcctttgaggacttgtgaccaagaatgtgctgagatcagaaggtgagccttccccttcctatattgctgagaaggttgaggtcctaagaaagcagtctgttcagcttcccttcccctctctgaattgacccttccagcctaatattccaggatttccatcatgtgttctctgtgcccttctcacactggacaatttgcaacctcctaaccacagcttgaggcttcccctctcttctcttcattggtgctacattctgctcctatttcagcatggtctcctggtgctccagccccatccttcggtgttcaggggaatgaatgtccctgcctcagtggcttccactgcaccagccttctcccttttagccatcaggccacactgctcatccttcgcaccctcctccctgaagcgtttcctaaccccctgaggcagaactctcaatttacctctttgtcaaaatctatccaatctacaacttccaattaaatgtatctactttaagatccttctttgacctcaaggctcacaagtctctcttatgaagctcagtactgctttgtttatattttcatgttggcattttccttctcccccctcttatagggtaattacctgtgtgcttctcttactatctcaacctgtcagattccaaattcctttaggccggaaactcaccatgtcccccataatagtcatcacctagtaggctttgtctcctgacttgggaagttttcatgagatccatcacgaaactgaattatgcaagctctttcttaaaaagctggtaaaaccaaagtttataaataaggacttatcactgaatacagatctgggtaaaaaatattttacagtcacttcatgcatgttactgggagtttcttcaaccagtggaagttattcttgatttgattgaagggtagttgttaagcatctctgagttagggtgcttattaagttatctttcttgatatctcatagaggccccaaaatagttgtaggagtaattaattgccaaacaggcatgacaaagctacccagagctttctgcaaataattttgaacatattaataatttgagaactatatttgtgtagaatattggtggagagagatgagcatcctcagtactgccctaaatttcttcttgctaccttagtggtgacatggagagaagaaagagcacagccctggagaggtgagggtggcaggatgaggggtccagtccctgtgggccttgcagccacactggtgttttaaacaggaaatcagcctcgttcaaaaaccatattcttagctagcataagcagcttaaacagtcctgggggtcatataccacagcagtttagagcagtgttatcaatttgttgactatttaaaggtcagaacaaactagaaataaaggacttaagccattatctagttcttcagcccccaaaccccaaatttgaaggaacagaggcttttcaaacctagattatttaaagtaattgaaccttttccaaatttaattattcaaaatatattctgaatacctgtttacttaaaagttatacccaaattcctgaagaattgactgcttagcactataccaaaatttatagtgcaaagcagaatgtaagaagcaatgtaagaattgtaggaaaaaaggagccatgaaagttgagagagatggatgtgcaaagatgaattcatggaagaggctgcactgtgactgggccttgaaaaacaggtaggagttctgtaagtagagctgaagcaaaggccattctaggtgacaggagcatgaggtggcatcggtacaaagatggcaaagggcagcacttagggcaataagtaatccaccatggcccgcggattaggtttgagtggggcagtaggcagtgtatatctggaactgacttgagagaactgtcagtataagctaaagagttgaaactttacctggtaggcaacaggaagtcactgcatgtttttaaggcagggaaaggcataaactaagtaccaagttcaatttggctgcagtgcagaggatggattatagaagtgagacaagaggcagaaagatcaaggagctgtgacagcagcgactgcagaggtggaagggcagaaccggagcaagggcagtgggcttggaaaggcattaagaaggagtaagcgaggacttgggtactgattcaatattgagagaaaagagaaagagaaaaagagaactagaaggtcacttcagtgtgtcaatcctggtgactgtgactcagaaaataggagtaccatgaacagaaatatgagcagaaagattatttccactgtagtcctgacttatcagtttgttacagatctttccatttcatgtgcccctttgctataataatttgagtaatgctaaaaagtagcataaatcaacttgtttattaaatggggacctagtacacgtttagatcttgaacaaactaaatgagaactaagagtgcatgctgagaatccccgtagccatatattcctttccagagagtcagtgtctgccctacatatcaacctagtttgatttactagattatggtctttaaaagaaaaagaaaaatacccgaggcaaaaatgttgccctatttatggcagtacgttctttggcttcttgcacttttaatgagaacattgctctcaggagcaccagttcctgatgagcccaatagaaagtccatttgccctttacaaggcagccatagtgcaagcatagctggtgtcaatttttccactgctctttttgccagtgtttcccagcccttgactcaacctcctgggatgaagatattagctattttccatggcttatttactccttgacacttttcttaagcctgccaactctggggctagtgtggtcctgacttcgtaagctggacaacgggtctgttgggagttgagctagaaagagtcgatgcattctgtcgaggccaccaagccctcacagacgaagatgtgatgtgcttcgtatgaacttatggaacagagttacactagttgctctgttctgaaagatgttcttgacattttctttattggtgaatgaatttgtgtttacctttggccacttgctgaggtcaggagcatgggaacaccctgtgtcgctctatggaaatgccaaggcgggaggggaagaggagaaggtgagatcacacaaatccagaccagtgcccgtctcggcagctgtcagactctgaaatcatactttccctgttcttcctgacctcacagaaagcaagtggttgagttgcggctgggatagaactgaacattttaaaatgcttgccttagtgaggagagtgatcctgtgctttttgttggaatctcactctcagcgcagaggggctgaggttagagcaactctttaaaaccgcaacatttttgttcagaaatgtgacatgatttgcaggtggtgacaactgatttgacaatgactggtgatttaggtctacctctaataagcgaattaatctgagctaaaacatagtgatctgtcatgtttagagatacctcaacatctggctgacttgtcctctgtcagccgagtttgtcctgtgcaaatcttctgtcaagtgaggaaaagaactgtgggtagaaaattacatggcagttttagagttagtgatgaatttttctcccaacataccagctgtgccagcaacactatttttcatggcattaatcaaatatcttgcctgcagcaccttcactttcccaaaggctaaaagatgaatctgtcaaaaaatttcactgggatttgccaacagcttttctaagctcaaatactagtccaggcaccttagaagtttgagcaaggcttttaggaatagcctcggggagttaaaagctgtatagggtaattttcctttacactaaacaaaaaatcgaagcctccattgcagccagcatgatcaagttttcaagtctggaaaagggccaaacactcaagctttattaatgtattccatttactgactcatagcaaagtacttttttgtggtcggaattttgaaattagcaaggtacaagagcagttgaaggccatgggatgaactcgttgcttgctccttgggaaagaaaatcccagaagagaggaaatttaggtggggggaatgccacacacccacattcccacaaagatgctgcccacagctaagagtatttgccaggattaagatctgtgaagagctgatggttttcattcaccacctgtaacctttgttatatctctcttgcttccaaaataaacatggcatatttgctttatgcccatcggaagtaatgtacactcctgttccttctcaaaattaatatacattttagagtaatcactggtgaccctgagatttgctctgaatgaatgggcaaaagctgttacgctgatctgaagtgtagtaaatcacagcgatcaagggctgtgccacattaggcatcctgctaagagtgatttttatagcatcttctcttcactgttgactatttcttaaaagacaaagaccattctttcatgccttaaatggtaaagagaggtctctaagagtctttgccatttcacttctctggcaatatcctcaagattactgagcagttaaagaaaaaaaaaatggctgacacttgcatctctccactagtaactgcgtaggaactcagcaatagcttttaggcacagtaactcggaagtgcatgagacacagcggggactcaacaaattgtgaagcaaatgaaatccttggatcaattatatataaagaaattaaacaatgtattttttcacatatccaccctgaacagagaggtatcaaatcttgttctgtacatgtttcaggacagtggtccccaacctttttggcaccaggaaccagtttcatggaagacagttttttcatggactggggtggagggatggttttgggatgattcaagcatatttcattttattgtgcactttatttctattattattatattgtaaaatataatgtaatatataattaaataactatacaactcaccataatgtagaatcagtgggagccctcagcttgttttcttgtaactagatggtcctatctgggagtgacagaatcatcaggcactagattctccttaagtagttgcaacctagatccctcccatgcacagttcacaatagggtccatgctcctatgaagatctaaagctgctgctgatctgacaggaggtggagctcaggtgataaggcaagtaatggggagcagctgtaaatacagataaagcttcgctggctcacctgctgctcacttcctgctgtgtggtccgattcctaacaggccacggttggtaccggtctatggcctgggagttggggatccctatttcaggttatctactctaacctgattctagattcccttctcacatatttgatagcaatgaaatgttttcccactatttaaatgggttaatttgccacagttcatagaaactggtaagttgcaaggcctggaaatgcaagcttagttttctagtaagtgcaacttgaattagcaatcaaacaaagcagaccttccgcagttgaagaaggctcatgaccagaaggatttgagtaaggcagtaaaaatgtagaaagagaagcagtgaggtgctgtcagttgtgggagtagcacagggaattggttctctagtctgctggatttcttgttctttgaaaattaagtagtatctgaaacctttaagagtaggcttaatttcttttttactgtttccaaatgttcatatctttatatactttaacgtatagataccatttctttgattcaggtttcagtcttactttgagatagaagttctttagcttctttgaatcagaaaagtcagcttcatatctcatacaaaatttctaacatttctgtgattttatctgccaactcttgagaaaaattagtcataatatataatttaaatttcctatgaaatttactgtgaaatccaaggcctattacctttgtctataggttttgatcatatttgcaaaaactcattaatagaagcatttctctgttcctgaagtagactggacgaataggttagcccattattgcttgtctctgaatgtgctcttaaactatatgaaatgagacaagactgagatgattaaaaaaaaaaatccaaagggtaccttgattagatgcactttagcactataaagcagttttcttttaataatggaaagtgaagaaggtttcattagttcagacaaggatgtatatgaaagtaaatttggagccttctctgtgtgtatacgtgcacacacgtgctcttttagaaagctcacacaccagcagggacattatgtagcttgcaatgataaaatagaactgaaggggatgttattttaaatccactcttgtctacccaaaaaaggtgcattattgggaaggactttgatagtggtgtattttacagtttgacaacttgggactttgtaaactggcaattgggtatagacgaagatatccatttatctcatatatgtcttgttgaggcaaagctgtcagaagaaatcttatcacatggtgccccatttgttttctgtggtgatttatgatggttttgaaaaggtcttgtgatcccataggctgccacgattctctgacttttctctgtcaatggatcagatttttgacattttctgagagcattcagaaaatatttgataaatcagcttgtggtgtttattttaattgatctgaggctcattccttcaagaattcatcaactacagtgacagggtctggatgtgctgcagtgaaatgaaagaattgggctggccatgctcctgtggtgatgatatagatattttgttgaaagtttatgcgcaccgacgagaagatgtcataactaatttagtatgttgtaaatcttttgacacagattctaattcataaatctcatccatcacatgtgattcatgaaactatagacaacctttgatgagaaggtacttctgtctctgttccaagttccttacatttttccttattcaaaaataaatcattccagaacaacagaattctattatgaaaatggaactgtagagacccttcattccctcacttctgttcttatacccataaaaagaaaaactctttatttgaaaagaaaggtgtgtttctcttaggacaggaagatagaagtgtatgtgctgtatatacgtgtgcattcacaaaaatatgcaaatatagagagagactgatctcaaagaaatggcaaagatgaatgttaactatttttctagaataaattgacttcagataaagtcttcctcattttaatttttaatttgaaattaatttcaaaaatcaacattaatagacataacatacagttataatgcaccaaatatatgttttatgcccattcttaggtttacttggcatataaatctatttatttatttatttgggctacaagttggccttattgatttactctatttcagcttgactaataaacaggcaatcatttttctcagagtgtcaaatatctaacaaaggatggtccagaaaatggttggtacatgagatcttggttaacagatgcttctgagaaacctaaagctaacgtgtggttatatgtcatctaacttaagtctggccagatatgaaaatgctttaccattagtaaaaagtttgtacatgtatgtcgttacaaatgagtcatttaaatgactaggtaacgagaagtatactaatgaccatggcctatgttaaagttatttaagacttagttgttgccctgacaaactttctaactgcaatacgtgaaaaggtgagattgaagatgataaagacaaaattgagatggatgtggaactcttaaaaagataaaaagaagaagccatatttacagataccttgaaacatactttatgaggaagtatcatgaaagaaataaaacttaagtctaggcttgaagaaagtgttaaatgtgatattaacttctaatttttgaacatctaaactgtcaaaaaatactttttgccagctaaaagatagggatgccaaagtgttcatgtaaaaatcatattagatgagtttgaaatccaggatttcttctcccctctagttctaatagtcctcataccttgtatcattgtgcgtatatttaaaaattatttataacaagaggcaaaacataagtgcattttagtattataatggaggaatctaattttattaactatctccatacccccactatggttaaatttttatataaatagctagtaagttccaaaattggctaatatggattttcataattatctttcccttctgatggatgtggtagccatctgtagattacgtcaaagtgagcaatgcacagtaaaagacctggataactcacaaattagagaaatgtctctttccttatcaaaacctaaataagcaaactacaaggggtaaaaaaatgaaagaagaaaaaaacataagtaaaggcgaaattcacacacatcctctctttgaagcagtcaagttttagaaatgaagaaactctgacaggggaaaggtcactcagaaaaagacacagtacaaaatgccatttctgtaatggagagtaatttgaaataaactcctgcttggagcccataatgaggaagaaaagaaacaaagagccagaaaggtccagtgtcagaatttaaaataggtaaattttaatgactctgaaaggcgcaatgaatgaccagtatccagcagcctgagcagaaatgatgtgaagtggcaatctgtctgcttcacccatctctcttaccaagttttctctcctaatgttcaaaaccactgttctcagtctcagaactctctgattaccagtcggttctaagagcaaagaaataaacattagttagatacaacagatgagataaagtctactgggtccaagattgggatgcgtcaataaagtggaaccataagaaagcggatttccgtatagctaacaggaaaaataaaccctaaaaaaaaaaagccattttactgaaagtgctagaaacatttactataatctttaacagctttctactgtgccaacatgatgaagttactagtcccttgataattcaggcaaccatatagaattttgttctttacttgactgcctgccaatagaatcaattgataatgaacctgatgtttccctcatgagaaaattaaaaagaaatagtaaaaggaacaaacactaaaattctacagatttgacagatcttaaagacataaatgatatgaatgttgtagcattaatcacaattttagatcctattgagtttgcccaagtgttggccttagttattcccatccagattgcagctcaggaaatgtattgagacgcaaatatggtgcatgtggtttatcttttcaccgattatacaaacttcatcaaattgtaaaaagctttgatgtctcaagctgttccattttcatagttgagagtaaaaatgaaagaagggaagttgctataaggaagaactctgcagagattttttttcccaatcagtcaagaatgcattaagtaattctacttgcccggcacccaataccatgctaggtatgtttggtgagatacaaaggagggcttggaagtgggatcgtatcccagtaaaccttcagattcttttattatcctgactaccacttcacactactgcatttttggacgttaaggtgtagttcagggggtaaaatatcaagacctacagtaacatgaagggaacagttttataaacaacgagtccatggccaaactggactgtgaatccagaggaggctagtagagtcaaggaaggcttcctgggaagagtctgatccatccaactataaagtgtaacagtaaaaatattaagctcaatattttgctaaaaatactggtcataaagaaaagtagagaaattcagatcagcccacaaagtacaatggacagtggatgacagtatcccagtaagccttcaaattcttgtatcatccttactaccacttcccaccctatttcccctgcagtcaaagtgaatgacaactcaggccaaaataacactggaggcatatttgaccataccccatgtataatacatcagcatttggacgcagcttcacaatacatccagagtctcactgcttctcagcccttcacggctaccactgcagttcaggtcgtatcatctgtgtttgcgtgtctactgcagccacctaatgggtgcctctgctttctctcttgcctcccgacccaacaaccacgatggtcctgtgcaaacataagtcagatcttgtcactttgttccactctctccaaggccttcccatcttagagaaaaagccaaaattgctataagccctctgtgacctgccaaggcctcctccccacacaccttttatttctctgttgttatctcctattatttcgttgtctttcacttccatccagccatcctgcctcctcactgggcactgccctctcttaataattcaggcaacctcatatgattttgttctttacttgactatctgtcaattgaatcaattgataataaacctcatgtttcacttgtaagaaaattaaaaagaaatgctaaaaggactcctcaggtactcctgtttcctctgcctagagcactcttcccagatatggcatcgcttgttctccttttcgaagtctttgtttaaatgtaacatgctccgtgaagtttctcagactaccacatttaaaattgcaaacttcctcccccaagctccctgacacccctaaaccactttctgactttatttttttccataatacttgccacctactggcataccatgtaattcagttattgcttttgttgattgtctgtcttacactctcctgggatggggaaactttgttttgttccccgagatatcccatcacctagaacagcatgtgacagatactaggtgttcaataatatttgtggagtaaatggattgtagagctagaatcaagatcaccatatcaaaggaggatgctctcccgaagttgtgttgcatttggtttaggacacaggttcctaaccgggtctctttggataggatttgggggatttgtgaatctctgaaattgacataaaatgttgtgttcatctattttttatgattgagtaaagttttataacttttgtgagattctcagaggtccttggcataaagaataaagagaaccactggtttagaatgcccccaaagcacttgggaagaactatgtagttttttttttttttcattctattaattaaagcagaatattaatcatcttattttaaacataggaaaattgatacatagaaaaaagttttaaatgagttttcacaaatccaaaacatccttatattttggtaaattatgtcagcttcagtttgaatgaaaggaccagatgtcagttaactcaaagcagtcagagcagcaaaggcctcatcagatcatcatttgtttaattctctaagtaagttttgcgcatctagtttatacacattcttgtcaatgtgttgccttgaaactacttcctgcctactccttacatgtgtgtgtgcacagtgggtatttgtttattaaataaattaatattgaatgaatacagccagaacttggataactacctatgaggtattatattaaattagtggtaaaatccatactgtttgatttccaatccagtatgttttctgtttgactgtgtagggtctgtcttagtgtaacatgaccttttatttaattagaaacataaataatgtgccaacagtgtttgtgttataatcttggtcttaccatggacctaattggtgaccttggcacttgctctgccttgattacttaaattttaaaatgggaataatataattaccttgttgtcttgactaattaaaatataaaatataaattggcctaagccatcccaaacatccacagcttattttaaattctgagcataaaaccataggcataaacacgataacagagaccacttttccagttagtcaacatacaggaaattctgctgcaagtagggaaatatctttcctttgctgtaacaacaggagagctgctaccttggtttgcttgtgacaaatggggatgaatccctttgaagacgctgcaggagagttcaggctgattaaagacacagaggtactttaatgaaattctccacactagcttgtttttggtgaacaactatatgcagtagaggaggtaacaaagcaggtgttagaacaagctttgcccaaagatatctggatgtttctatctgacattattccaaaggcaagatgaaataagcggttagatatgttgtcaaagagattgatgttataaactattttgaaatttcctctgattaattctataagcaacatagttcttcaccaaaggtaatgctgtgagttaggggaccagatattaacccatattgtctccaaataataataataacatttgggtataaagaatggaaaatgataaagcaataggagaattcatgatttttcaatccatcaaaaagtgaaaggctattggaatcatttataaaagtaaactttattttctccctttcattttgtctgtctgccatttgtggtcttatagacttgttagagaatgaaaggatcttaaatggttaaccaatgataaaatagaattgtcaaagagaaattaactggccaagatcacttgactagataatggcaaaaccagaactacaacccagaacttctgacttctaccccttccctctttgcgtgtatacgtttatgtcaggatctttctggcagtgctttctcccacatcatgtctgtgtctatgctgagagagacaaagggagagggaatgaaaatgaatacgaatctacaaacatctaagtatattaaaatttcttattgtattgaaggtaatatttgcataaaatttacctttagagggggactgcatgcagttacaatattgagttccagaagaggtcactgatttcccaaaatttgcctttctcttaacagaggatacgtaaatatcccaaatgttgaatatatatgaaattcagtgcttcttgtacaagatgttttacaagactttaaaaattctccaggggtgtatacgtcccactgtgtttgaggcaattaatacttaacacctttagcaatattccccagggtgattatgaaacgtagactattgggccatcattaacttattgggaaagatagcatcatggaagcacagaatgacaacatcattcaatgtctgctagcctgcattaaactaacgatgctactcacttgttaacaaatatttactgaacacccaccatgtgacaggcaccatttttaggtgctggggccacaccagtgaaaaaagcaaagcttcctgcctgtatggagtttatattccagtggagggagatagatagacaataagtagaaaagaaaccaaatacatcagttttgtagtattttaggttatccatacaaagggataagaaagataaaaagtaaataggagaaaaggaattgggagtgccatgaagtgggagtggagcttgcagtattaaatattagtatgtttgttaagggtactatactcaaaacttctttcaaccatattctctgtaatattaacatttattccaagccacacaaagcatcaaagaatttgagtattatatatatttatacgtatatatatatatgcattattgtcacataaaaattcaatgaccatgtgaatttttattcagaggggatggagagaaattagtctaaaattataaagtttctgtcaagtagcagttttaataagcattttcaataagatccatgggaatccacactgggtcacagcattgttgaggaaacggaactaagataacaaatgtgagatcatgaggaggattcctcatataacgtacaaataaagttgtttttctttcttagtctatggtactgaataaagatacattctgataccctcttcagacacagttcaagctttgacctttgtgaagttccaagaaccttggcaattttgggtcctagctaaaatactcttcactatttctgtatcgggatgcacctaactgaaaaaaaaattagactttaagttctatcagtgatcttgagtcactacagcatagaccccaactgcagatcctcacgtaatagttgaagacttttcagcttttagttgaagacttttcaggttttcttagagcaaaggcagccttattcaaggtagttcaaggtaggcagctgattctctccatcctgaaggtttttcacgcacataactttgcacagtttcctacaagaacatcaataacaaaaaggagaaagattagggtaaaaacatattagaaagatatttatttatataagttagtgttgatgaacacatctgtgcctatgttccaaaacaaattcctttcactatgctttaaaagcaaagcacatttggatgtgctgtgttccacaggatgttcacagagatgctgatgaattggccacttaagagttttccttgtcaacaaagagatgtccaaatagccatgtaaataaaccctcaagaaaatctcttatcagcagtgtatttattggccatcagagactcgacccaaaaatgcaaacatggtgaacaaaattccttgaccacaccagttatgagtggttttaaagttcacactttggaagttgaatatgcctctttgccataaagcctgcatcacagaattctctaatatgttgcgttgtgaagctagtggaaaaaatggtttgttatctctttgtcttacagtttaactctcatctttaaattctcaataagatttcttattaaaagagtaagatttctttttaaaatcaatatgatttgctatggagatctgcttataagcattcaaggggcatacagctcagatttttaatagaatatttaggattcctagatctatcacaatgggcttctccaaaggatattcagtttgtcagatattcagtatgccaggacacaggttggagaactgtgaagaaaatgtaaagtcaatgaagaaggtagcatttgggggcttcagggagtacaaagataattgtggatcaattgtgccagacaatttgaagcaacttaagactgccgtcagtactttaattgtttctgctgcagagtttgaaagagcatttagttcaatgaatgatgtgttaacacctagttgcgatgctccgtccattagttgcatatcatctttgtctttttattgagctggttggtccactgtttcacgtgtttaagcccaaagattatgtcaagaagtggcttgtaagtggcggcttgaaagctggaaattgtagaaatgtgacaagagaagctctctggctcttctgtcttacttttattttatttgaagagtttgaactgtttccccttccttaagcctgggctcctgggtattgagagagtaagaaaacgatacaattttctcacgtaatgaaatagaaagaaacaagatcatgccagcattaagttcagtaactttttcacttttgggaaatcaataataccttccccatgaacatccaatgcatagttgatagaaaaccaggtggagcgggccgggcgcagtggctcacgcctgtaatcccagcactttgggaggctgaggcgggtggatcacaaggtcaggagatcgagaccatcctggctaacacggtgaaaccccgtctctactaaaaaaaataccaaaaaaatagccaggcgtggtggtgggtgcctgtagtcccagccactctggaggctgaggcaggagaatggcgtgagccccggaggcgaagtttgcagtgaggggagattgcgccactgcactccagcctgggtgacagagcgagactccatctcaaaaaaaaaaaaaaaagaaaaccaggtggatctctctaaggaattcttaaggacccctttgagtctatcagtgatatgtcaagaaggaatatgcattgctataggaagaaagagaaataagtgaggatcattatcagaattgccctttcacattagagtttgttctgatgagaattcagccatctactactttggtgcctgcacttgaaacagagttttggtttgcatcctggatatccttttctatagtgtgtgtatgaacttgaaaaactgatggactgaagaaactaatgatagcagtgaggcttgtactcctcaatggttttttttgttgtttttgtttttttttttaacacattccctctagactctcatatattctcattttctccagaggaaagagtctgagaaactcaccattgtatgatccttacttctccttgtcccaaatttaagggacagcatttcagacacactgtcttctgtcgagtccacagccatttgtttttctatttttttttttccattttcataccttttttattctagcactagacctgaaaacctacatcacaggacttggtagcttgtgacttcaaacaacaggcattcaaattcaagtgatgatagatagctcatgattaaaatatctcttttctttgtgcaatgagccagcaagattctttgagagcatttaaactctaatgctatcatacttcagcattcttctttagaattcttcacatccacaatttctcaagagagggtatttagctgtccaaattctcatcagtgctgctgtgttcagccataaccttgaactatgcctggcctttctttattctcttccaggacatattcctggagttcctatttactttgtctccccacatgtatatccactgagagaaagcaccatttagaccattaccaagtcaattttgagtttaaatacctttcacttgaaagtctacgggattttgatctgtttggagtggataatttgaggggggtctcttttgcacaacttgtggaaaagctctgtctccttgatgatgagtaaaggaagaaaaaagagaatttgagttactgaatatttaattctggacagcagtttaatcaggactgggatttgggcaatggctccagccccctcctaacttagtacagtttcagttcttagtattccttaattatcccactgagatgtttgagaagcaactagtagtaaatgaacttggcaaatcagctattacccaagtaatgaaatacaaatacatatgtttgacaattctgcagggaaattttttaagccaggattctcaatggattgtattggccaagagaggaaaaaacaggtgttgttatcaaaccatatctacaaacaatttgacaggagttttaaaataatgcacagattttcttgccatgaattccaaacatgtcaattaacctatggagaatcctgattgtcaaataatgaatcaatatatgcccccccaggatggagaagggagggcttgctgtgacgtcgggttaaatattcaaggctttctcccaaacagtatatctaaggatgcatatcaacttcacatctaacctcaaacaaagcagagatcagctctactgagaaaattgattttattcaacagtaaggcaagggaaattagtaaattcaatatttgtagaaagaagataagcgaagccagctattcctggtggtctgagactattctttgttttggtaattatgcctttatgttttagggctcttatttacattttcagaagggcttgaaatagttcatgcaccaagcatccccctgagcatccagcttcttccactgtgcaacaataaagttgtccctggaccaatacaaattgaaaatgaatcctaactttatagaaagtgctgctttgcttctctcattgtttggagcttctttagagctgaatcacaaactaatgatctccactgcagccaagtccttggtgtgatagtatctcattgtagtggagcccacatttacgtaatgtgtagtctaaaatacctttgagttcaagaatagaactatggaaaataattttatcctagtttgtgtgcacctggattgtaagacacaggcagaaatacagcaatgggatgaatttactaatgtttgctattggatggtaagccattctaaagctatgaaagccttcaaaaccccataggtctccattttgccattagccgtaccagtttaaacagtctgctgcaagaaatattgacaggtcaagtacagctgggaagagcacgtgtcccagtggcctttacactgacagtttctcccacattaaagagttaactagcagccaaccagctcgaagtgggagctaatgaatgaaatggagattgatatagactctctttggcggtgcatcgatctgtatcttgtgaactcagcttaggaattctgcaggcagcattgcctgaataaccctggcatggtgcccattagcaaataactcttttaatgttggtcttccactgatatatttattgtattgcatattacagtgacccttccctacactgtgtttgtatttgatggtcgtggcaacaagctaagggaaggctcagcagcaggatacatttgcgtttgggcagtgtcaaagaaatatttaattaattgcatccttcatttgcatgtgttgcatgaaaaaggtctctttggggcactgaatcctcttccttgctgcccagctagtagtagtgaatctgtcgaatatgatctgagaccttggcatagacattatctcttatgacgatttcacgttgaaaatagattgtgaaagaccggttagtcttgcaagctgtaattgacgatattatctgtgtaactgataactagcagaagaaggcaaaggtaatcccttcttaaagaactagttggtgaccttctaggtgttgaccaagtccatgtgagtttaagcgtgtcaactttagccatacctgagtgggttcttttcatttaacagttgttctcgaagctcggtattcataagaatcacctggggagcttgtgattcaggatgtctgggttggggcctggaaataagcattttaaaactaatagttttgatgcaggtggtcttcagactataatttttaaaatgttgacttaagacattagaaacaagggaattaattaacagacactcagagcacactgtgtccaaaaatgcgaattgctaaaaagttaactgctgtatttataacattcatttcacttcagtgatctcttttctctatgggtaactgaagtatcccacccccggagctggagctgggttccacttgccatccttgccacagagtctatggtttgggccttttcacctctccacagatctacagatccaagtccagttcgtaatgcacaagaggtgctgctttacctgtacagctctctacgctcctccattgcctcttaactactcatgcattcatgcagaggaaacgctcttttttaccaactcatactggagagtatgtcatcatgccaaactaatgtgctgaaaactgccctcaagagatgacctaagtaagccaaataccttcttttataggaaaagatcttaagtccatagagtttgggtggcttgtagctaagccagaaatatagcccaaatcatcattccatccctataggacaagcttgctgaagaacacagtcagccttctgtatcagcaggttctgcatccatggattcaatcaaccatggattgagaataataaaaaaatcccgtaacaataaaaaataacacaagtttaaaaacaatacagtataacaactatttacatcgcatttacatggtattgagtattaaaagtaacctagaggtgatttaatgtatagggaggatatgcttaggttatatgcatataccatgcaatttatataagggacttgagcatctgatgattttggtaatctgcagcaggtcctggaaccaatcccccaaagatactgagggatggctgtatgtaattgatgccctcgaatgcaaacttatttgaaaaaaaactaataccacctgtatctatcattgaaataaaagcacctaggattatgtgttagtaggataaccaggatcatccatagagaaagtacagtcatgtgttgcttaatgatgggaatatgttctgagaaatgcatcattaggcaattctgtcattatgggaacatcatagagtgtagttacacaaacctagatggcatagcctactacacacctagcctaatgctcctaggctacaaacctgtacagcatgttactgtactgcatactgtaggtaactttaacacaatggtaagtatttgtgtatctaaacatagaaaaggcatagtaaaaatacagtattataatctcttgggactactgtcctacaagtggtccattgttgattgaaacattattgccagcagtagtggctcaaactataatcccagcaccttgggaggccaaggcaggaggatcacttgagcccgggagagtgagaccagcctgggcaacatagtgagactccatctctacaaaaaataaaaaattagccagttgtggtggcgtgctcctgtagtcccagctcctctaaaggctgaggtaggaggatcatttgatcccaggacatcgaggctgcattgagctgtgtttgcaccactgcactcagcctgagcaacagagtgagaccatgtctcaaaaaaaaagagaaaagaaacattgttttgtggcacatgactgctgtatataatctgctttctcccttcagagccaatttagtttccagagaactttaaggggatgtaacaatgcctgagatttcagaaatagcttatttcttccctggaaactcgaattgggtcaaaaccacaaaatatgttggttcttacagggtgccttgcactttgccaggcactagtgctagtaaaattaaatacatggtgtttctaaaacgtcagcattacccctaatacgtgcactgtctattggcattaggggagccactaactctaacaggttgttcagggccaaaggaacagatttgctgtgggtaaatcagtagcctgcattttaggggttctgtgaggatgcgacagaaaataaggttacacacagtgaactgctccaagtgacatttaaggaagattatttctgagagcgatgtggaggatagatttttgaaagatgatgctggaaccagtgagatcatttaggggctgaggccatagtccacgtataaaaaagaaggcgggcagggggtgcccagatgtggacagtaacagagagcaccaggagtagtatataaatcagagaattatgaaggcagcaattcctaggagtttgcgatgtgaggtgggaggtacttttctccaaggtagtgaatttagttgggggaataggtttggggatacggggaggaaagaccaaaggagattcagttaggctgaattgggttaagttttcaatgcctgtggaacattgtggtagagacttgggaatgtccacggctgtgaatcatcagtcttgctattagccaaagccacaggcatagacaagattgtttaaggtggtggttctcaaagtgtggttccccaggccagcagcatcacctgaaacttgtttttctgaatgcaaattctgagccccacccaatatctactgaatcataatttccgaaggagggatcctgtcatcagattccagccctctaagagattctgatatatgctcaagtttgagaagcactggtttgaggaaagtatcacacaagaacagttacacagctggtggagaaaagcggggcccaggtaagatttttatgaaaatatggacagagaagaaaggaaacagaagggcgtacattgtgccatttaaagacaggtgagtgttttgagaagaaaagaatggtcagtaattttgaatactgtggagccaggtaggaagaggcctgggatatgcccatcacatctgagaattagcagattggtggagattctggctagcagtttcagagaaataggacatatggaagtcagattacagagagttgtcgatggaattggatgtgaggaagtagagataagaggcttagattgctttttccaaaagcttagctggaaaggaagaagagttagaagaagaaaagcaaggggaattttagactagaagagaggtatcatttcgagatgtaaaagccttgggtttgtttatggattgaaaggaaggagtagaggctgcagacccagaggctcgagcagggagggtcttgctttggacaattgcagtgatctcccaacaagtttccctgagcctccattttgaagtttaatcaatcatatccttcctctaactgttcaccagcaccgccatcacccattatcagacatagtccagatgtaatgttctgtatgagcaatctaactactgatgtaccctccagaagcccaccttccctggacttgtcggggtctttggcttctttgtcctctgccccactccctgccaacttggagaatttcttctaatccttgagatcctcttctctgtgaaatgttcccttcccatttatgcagcattagatcatttttctggcttccagcacctgtacatacatccctctgtggcatgtccacatgtaagtgtcatggactgtaaacacgactagacctaacttttttttttaagacggagttttgctcttgttgcccaggctggagtgcaatggcacgatctccgcctcccagcgattctcctgcttagcctcccgagtagctgggattacaggcatgcaccaccacgcctggctaattttgtatttttagtaaagacagggtttctccacgttagtcaggctggtctcaaactcccaacctcaggtgatccatccgcctcggcctcccaaagtgctgggattacaggcgtgagccaccgtgcctggccctaacttactttttattccactaccctgcacagtgtctgcctgtaataggtgttcactggcagcttatggaacggatgaatgaatccatttatgaaaaagtgtttgcccagtgtcagcattaaaggctcacgctagcatctgcattatttgcctgcctccagtctatgtatcaataactgctatgcacagctatagcggttttctttagaattgaagggtttcttagtgtatgggcttttctacctgagctgatattcctgctcctgaagttacactccaagggcatgtcaggactttcctaacgccacagtgaccctgccatgtagtcactcacttacgtggtatgtggcagcatgggagagtttctaagaaagtctaggttaaatcttgagaatcaggcagccgctgccagaaatcataaagcatggaggttttgaccatgcaccaagatttgatgcaaggcccccaaacgcacaccagtcagactgcccttctcagagtcacacggctgtgaaattccagaaacccactgcctggcacaccggggccctaaattgccaatttcaaaatgagacacaactattaaacactaaaaatgaaaatcttgttgtcaggaaatttttggcatcttcatttccctcctgctaccaagctgtcagcaggaggaggacactcggagtgtgcacacacacacacacacacacacagagtaattgcaggtttaaagattaacagaattggtctatctgctcttctattagaaatgttacatctatctttgttttcttccggcatcagggtaggcagagacatttttttcatggtaaaaaataatctttttattacaggcttgagaaaagcatttctctagattgtggagaaacaaactattttttaaatgttttctttggagtgacttttagtactggcggtgaaaaatgagttccccataatgctctaaagatattgagaagtcaatctttttcattgaaaattagtcacaaatctataattaactttttgttttcttcttcgatactgaaatcacaaatgaaaaatgcaaagcactcactctggcatatgatttctaatttcataataaagatgacctaataatcatctccactttgctggattcagcttgtatatttagaaagtatatatgaattttgacctatcacatcattagagtccattataactaatttttctccctatgatgttgaacaggtgatcagaagaaactttttctaagcttataaagcactactttttcatcaaggaaaaaatagattatacatcgttcaggaaggggaaaaaagttataaggagattttacctattgaatgtaatggattgtcaggaacccttgacattattctacaggcgaggccacataaaatcaatacatcttaggcaaggtttaatttatttgtaggttcttacaacaaatgacttaccttttttgtttgctgtttttttcttacttttgtactcatgaacagctacagtttttatccgtctcattattaagcacaaaacaaggtatcattattaccatgtattttttataaagaacgattgcaaagcatgaagaaaacttccacaaatctagaagttgcactaaatatgatggttgtaaaacactgcctcctaccctgttgtctaagatgcagaatctactccacaaaggagctgggctttaccccaaatcagaggctgtgttccctcatgccatgtgtctcctatgaagtgatctttccgtgctgtgagttccggtagggttagcggattatttgaaaggagcatgcattttatgaaaggaagtaccagaaactgagcagacttatttttgatagctgattctatgttggtgacatggtctatcaaagaaattatagcaaaaagtattggacatttcagcataccaagcactagtgactgtttgaattcggtctaatcaaatttttcctttttatattacttattttaggtttttggtgttaaattaatattaaagatcatttaaccagaattattttatactcataatcttatggatataatgggctgctggtcctccatctgcttctatcaaaccatggctggctgtgagcacagctatgcaggcagcatgaaagcaggaaggatactctggagtcagcaactagtgggtttgaacccagttcttctacttactatctacgtgatgttggataaactttttaacctctctcttcttagtttcctaatctgtgaaatggagaaaataataacaccagctgtgtagttctgttctgtagattaaatgataaatcatatacattttgactgtctagtacatgtcgtacacatatgaacacactaagtgctcaatagacattggccattagtagttttaattgcaagtgagaactttgcagttggtaggggcaacatcattgctgggctccttggggaaagactttcagtccagaactagaaatgtccagcctcaaatgaggaagttgaagccacgtaactgttagagcaagcatttcaaagcaattatttacagtggtaatggatgtggcaaatgtgtggattttgttgggatttcttctgacagccatgaacacagatatattttaaagtaatgtaactgtcctaaatctcgagcagggaatacaatgacttctagtattatttttcacttctccaatgacactctagaagttatatttgataaattccttagaagttatttgacttagaaaggcaccgcaccatttaaccttggttttgttctactcagacttgtgtccaaggcccatctaatgtaatacatcacaaaggttaatacaccaaagccttggcgtagcatgattccctaggaccacattttaaggaaaaccaccttagagtcaggctttttgaaatgttggtaactattaactattaccactctaggtttaagatagaccgtttaagcccctctgtagctaatagtataagagcaaaagcccaatggctcaataaatcagcaaaggtggatatatatgtagacacactcctgtctggattggccaatctcaagaaataggagctagagacaaatttaaaataagaagaattgtgctacccctaaaaaccaaaccacatgtgaaacaatctaaaaaaaaattgtctagataattttctaaaaagacaaagttataatttattttataaagttataatgtatttggcttttctgtgtaaggtctcgctggtaggctacataatatggctcctaggatggagttcacactagagatcgtgatggcagattgaagagtcaaaaattatacattctcctcttagctcttgttcaggagtgtgaccctttctttctgagttcaggtacataagagccaatgttcagctgttcccaaactaaattgccctgccactacatcttctccatcagcaaccagattagtgttggagcaagattataaagcttttcatgttcatatttattctttatgaatctgctttcttacatgattaaccaaaaacaactagaaagtaggcatttaaaagagaaaagtaaaagtgttatctgacttgaccaagtttcctcaggaatttagtggtaaaatgtgaactgaggcacaagtccttccatccatagttttgtgttctttcagctatattgtcttactgcttataatattctcaaattacctctatgggctggtcacagtgactcacacctgtagtcccagcactttgggaggccgaagtgggtggatcacctgaggccaggagtttgagatcagcctggccaacatgataaaaccccatctctactaacatacaaaaattagccaggcatggtggtgtacgtccgtaatcccagctactcaggaggctgaggcagaagaatcacttgaacccaggagtcgaaggttgcagtgagccgagatcgcgacagcgagaccccctgttgaaaaaaaaaaaaattatctgtataatatttacaaacgtgactcttgtttgatgccctcttcttgctccctagagaaaagagtgtcagttgaacccatctctcaggcaaatcagatttagtaaaacacattgtacccatcaggcaagtggcctgtaatattttcctggaagatctacctgaagtctatgcagtgatcatcttcacaatatgttctgacatttctgagactcttttattcatctatggctatagtttgaagagtatctcaaaaaaaagtttaaaatgcacatctttttcaataattaaaattcacaattcttagtttccagaagaaaaaaaacttataaaaatatttaaactccatttgatttcaaccatgatatctatatataaattgatcatgaaaatttaaacttctaatcaagggcagactaacattcattcatttgtccaatgagcaattgcagcggtctaccaagtaccaacaaatactcccagaaactttggggaaatgggggagaacaagtatattgacagggaaataatctggaaaccagtgctcctgctgtctgggagttgaaaatctcgttgtacaaatactcaaacatgaaacacatttacaaagcatgatagaagtatatagatgtagatgtaaaatagtatttgtttacatttttccttaaatatattttgacacacatatcagattataggtactgcatgatccaaattttgttaataaatatgtatgtgcagagaaaattcctgcaaggaaaggtacccaagtgttactggcagttctctctgtgtgataggataacgggtgattttttagtatcttctgtatactttattgtagtttgtacatttcctaaaacaaacatgtatttctctaatgaaaaggaaaatttttaaatgaccatctcataattgtgagtttgatagcttttcttgcaaaatgttttcactcactttttcttccgttttgacttgtttatctaacttctttccacggagcatggaagatttcagccttaacagatctttcttagccctctctgtagtagtcaagaaggctcatgatttctaagaatgcagatttctttgctgtaatgtgcatgttttcattgctttacttctagttgaatatgaaaaaaataacacagtccctaatttaatcaagctgcaaatgtttaaatatgaattaatctcctcataccagctaaagggcttttgtagattagcctacctaacaaacttcaaaatttaactcttaagtttgtcatgtaacaccactggtcccacaactataattgtgtgtaccactaggggctagggggtgattcttttgactgtgtctgaggttattaacttcacaaggagagtctatgtctaactcatttttaaccctggttctgatacctctctcctgatggagagcatctaacctcctactccacatttgtttaagcttctggtaatgtaaacccagcatagtgatgctcctaattttctcggtgtttatttctgtctatggtctcctgacacttcctttcatgaaaaatatattactattgtgccaaggtttgatgcctatatttctgttataattctttgtgctaatggtacagcggcatcgtgtctttatttttcaaattgaattggtggaggaaaagaaaatgcaggtatggtgagagtttgctgaccatattgtcttgcagaaagttttttaccccaagtaaatttctcatttgttttttagagtttgtgttcaataattcatcgattcccaacagcagggaagagtgagagatttatggtgtatgattgtgtcatgtcttgttttatcatgtcgatagatagaaaattgaccacaactacaaaagcctatttataattctatttgatcaccatgggaactcatcaaaacagagggcagcgctgaagtttcattaacagatcatctcggatctcctgctgtgtcctgtcttcattttcttttcacatcatccttttgcttagagctctagctttagagaggaggtcagagccgctgtaatggcacatttaccattccccaccatcccccagattaatattaaactgttaaaagaaaatgagagtttattgattgttttaagccaggcatgttctagcagcgagccgctattcagattcagcaagcggcaatagataactgatttcaataagaagacagagaggaatgtgggctggggatcagaagggagagagaacaatggcccaggaatgtttaatctttcttatggcactaatcgttacttttgcaatttgtgattgtttatagatcatttcttttaagtctgggtacaagattgaaaaatctcaatctagacacttagatttctgcaggaacagtgtagggtcctatttaatgctgctgggggaaaataaatgcaattttagacttgctctgtctttttaaagaaaaactgcattgtgcctgcttgccagtggggataccagtgtgcacctatttttttaattagcaggaaaactttacaaggtcacaacagagcatattgtttgtggtgtcagagaagcctggctgaacctctcttccggtggttttggtcttctctccaaatggccgggatggatggagaaaatgaattcacagatggctgtctcactgatctcttctttgtttgccaatattgtggctgccaaatttactgtgatgcagaggtatcttgagtaactttacaagaggctcttaaaccaaaaaagtgtccatggatcagagaaatggcttttatctataagccttgtcatctcctctcgcaataatcttcatataagtaatcatctcatcatatatagatcaatcagccttgttaatgctctgatctcagctctcacttttcaatgcagccctcgtgactaggaactattttctttgtaatttgaggttttgatttagtggtcacattagtcttgtcagtttgtagcagcataccatgatgttattcataaccagtgatagtattatctgctataaagttgcactgtaaatcaggaatagttgtcaacttaaatatttatgcatgtctagggaaagtaattgttaggcagacaccctttgctgtaaaacaccaacaccccagttctgatgtgttcggaaaaagaaagaaataaaaattaaaaaaaaaaaaaaaaaaaaaaacgagagagatggagcaagagggcaagagactgtgtaaagttagcagcactgctaaaatattaggattagaagttattcggatgtgtcaaaaagcatctttgttctgtgggttaagcagtaagctctcggagtttgccatttgagagctcctttgtgagttggctttttggtctttgctgtcactggttctgaaggttgaagagaagagcagtgtcagaaagctgattggtagcacagaattttctgagacaatctgaatcacatattcagctactttgccacagtggattaagatgatctaaaggggctttgtgagctcgataaaaatcaggcaggagagtgtatgctgggagaaattctaccctttttgtccttccaagttaattgttaaagttttctctctgctgtctgtagaatttttcaagctcaagtccattgtttttaaataatgtatgtaaatttttgaaaacatgcaaattggggagaagattttttttttaacctaaagactgcttgtcttgtcatttctcttgtatatgattggttctgtcaagtctgacaaagctttatttaatttccactcgagatacttgatctttatgatgtattttctgcttcatgcaaatttatcacaagactaaaaggtgaaagaaaaagtagtggctttcttgtgtggctttcttgtgtcactcgctcttctttagtggcattgaagactttcttgtaccaattctattaaaaattatacatgagttcataatatttgcataatttattaacacactgatcaaaatgtgccttttgccattgaaaatgtgaacatactccttgaatattgactaaaatctcataacttttggcaaacgagccatgaaacatatgttcagaagtatggcatgcaaaagtaaatggcatgaaatacctttatttatatatttatatttttggcaggggcactacacacattttgaacccaaacttgaagcgttagagttatgcctgtgtagtgagcaacacagcacattgcctttctcatttggccagccattgggtatgatgacacaagtcagaaccatgccttgggattttcctagtgtccttcccttatcctcagcataagtcacatatctgttttcattttcttcacagcatcactttgaggtaggtttaggagaggtagtgtcatctttatttcatacatgaggacactgaggaatgagcattaggtatcttgccagaggtcacagagctaggtacacagatacaagcggaacccggggcttctccatcccagcctagggttctgttagatactgccgtttttgcatcatggatttaagtaaccagatttagttccatgttttctttaaaaaaagaaaatgctaatcaagaataaagatgaggccggatgtggtggctcatgcctgtaatcccagcactttgagaggcagaggcgggcggatcacaaggtcaggggtttgagaccagcctcaccaacatggtgaaacctcgtctttactaaaaatacaaaatttatccaggtgtggtggcgggcacctgtaatcccagctacttgggaggctgaggcaggagaatcgcttgaaaccggaaggtggaggttgcaatgagctgagattgcaccaccacactccagcctgggcaacaagagtgaaactccatctcaaaaaaaaaaaaaaagaaagaaagaaaaaagatgagcgaataggacaaaaccacaatgactaagaactgagaaatgtcgagagttggtaagtgcctgaaatggaaagggtggatttctaagggcagttgttcagggtacctgatacttagttcctcaaaatcaccaaaaactctgtgaagctgcaggttcctggttccactcttgactactaaatgatatcctctgggggtgggattccagaattgcatattaacaagcacaacagattttccttgagtacattaaagtccacaggctctgtgtagtaatacctaattcatcaaaataaaggaaaatctgtaatcaatgaaatatggtctaatagcattttagagcataataagaatgatagagttactgtctctggtttgcattggattatttaaagcaatagctaaattatctctaaatagacagattaagtatctgcataaaagcagctctaggaaaacgattcactgaagccctgtaccctccaagagcatgtgttcctaaggctttacagcagagaggagctgcctctggtgggttgccttccagcctggcaaaatggagctgccacttgaccgagtaattcaaggactctctctgtcacagtgcttctgagcttgctgccatggtcttgtcatcctgtgtgcctaatgataatcacacatttgagtgtcaattttgacaattcaaaaatgagaagagctagagcacctctgtggtttcatctaggcccaagccatgaagcactacatgagtgcatgcgtctcacatgttccttcaacagaccttcattgagggccgtcacaccatgggagctggaagcacagcagtaatgaagaaagagaagttaatgcctcttgaaatgtatgtctttgcaaggggagctaggtcaaaagataattatatatgtgcttagtgccgtggatgaaaggtgcaagtgctgttagagcatctaacaggaaaagttaatctagtcttggggttctctgagaaaacgaggggtctgctgaggcctgaaggacaggcagaatttagccaggcaaaattgggactggaaggccatcctgattttccatttattaaaaaggaaggagggaagggatgtgacaaaaatacctaggctatgttcattgttttactcatcatatatggaacatgatatcatatgtacaaaggagtaggggaaatgccatctataagaataatccattacacttagcttaaccttttcttacattttcttaaatttatttaagacccattttctctccagccttagaatgtgtgtatatttgccattattttatctagtaaatggatgtctgcgtagatgactggtcaatcaattgatcaaaataatgtagtcatagttctgcctcctagtatctatataattcataacatatatgagtaacgatgaaattatagaaataagattcatgcactcatgtgatctcatagtccttcatggcttgggcctggataaaacataggtatcttaccacagcagtgctctagctctttttgttttcaaattgtccaagttgaatagtccatcaaaactgtgttcccttcttaccagatgtctcctggaacaactttgaaaatgcctttgtttgtggtctttggtgcctgtgagctagcagggcagtactcattgccacttaaccatttgctcacacgttagcaattcttcagcactcacgaagagatttgagtgggtccttatttataacattttttttttacctctgtggatccagaaactcccccagaggtatagagtaatcagcagcaatgactcaggcagcaaagattattgttcatgtgcctacattgtggtagcaacaaggagatagtgtttcacagtaggagctgtcttgtagtatcagctgtccttgaagtaatgggtttcaatacttttgaaacaaaagtgctgttgatcaaaatgatgtgaaagtcaggtatattattttctcatggaagcaatgtttatgtccttaggctcaactgtgtgatatgaatgaccacacactaacttgcttaatgaactagatagtctaagtatcctcagagcataaatccttccagaatgcaccaaatggcatagcacagtaagcaatttcatacacttactcagtttattacatcttcttactctctctctctctctctctctatatatatatatatatagccacatgatgaagaaacacctgtatcatcatgaaaagaaggcttctttagtaatatttttgaccagcatcttcgaagtgtattaggatcacttgatcactctttgatatacttatgctgccttctgtttcttactgtattgtccccatagcaaacaaaagcggttatgatctagttgttagtcattctgttgtatttagaaatggcaggtctttattctttcctgaactatcatctcattaacaccaattgtttcaccttgaaccaatttgattttaaatgcatgaaacaactgctatttacactgaaatttttaccctctgactcggcatcactttgttatttcacaatgtcaaggatgcctcccagttgtggcttaagtagtagccagatttgaagcattcaggggtgactcagtcctgaatcacaaaatctcccaccattccatcccaggtcacatcttgcatgttcccgtatatagttggtttcagctgctttttccttccattgataatatttttaattctagagctcatatactcagataaacatgtaaacctatagatacatagtcactcaaatggcaggcccattgtatagaacatcttactaactcttgaaattacctcgaaaaataattgcccatcttcataacaaagatggatttgttaatttatagtcactgaacacccttccttggtgataacctatttaacctcccctgctaccctttcttctctctcacccctctccgtttgattttgcccccaggttacaagaaaggcttagaactctgtaaagcagagaagggaacagatcgagactagcagcctgtgggacccttttgctgaacccaccaggaagcaaagttactgagatgaatttatctataaggggctgtctgcccactacaggaacagaagctgctatcatgggtgtgaccagctttgtgttgtgaatgtaaatcattccatttcaaattgctacaagctgactttaggtccattgaaaacttaggtccaaataatagtcctgcatatacacaaaagtatagtcttccaattgtgtcactttttgaaaataacttgggcatgtaccatttacatccctaacctatttaatgttttaaaacatttttcacagaaaacttgtttaacattaaactcctagaaaggaaggctttatggaaatctaagaaaaagtgtctaaaaataatctttgaaggcccaatttatagaattccaagtcaatataaacatacattttctgcttgctaatgaactgccatagtttggcttacagggacagcacaaaaagtatttctatcctctggactggcatagagttgaacacatcccagtgcgtgtgtgaagccaggctcagagggcagtgatgtcctcacatctctcccctgggtatgggaagacagcctgctctcctttttagtggtcgtttggctaaaccactgtcatttagcctcatagtccatcatcaccagtgaagccctccagaatctcacttgccattgtctctattctaaatttactctagtttgtcaatgtcccattggtgctgaggagcacagtgtggccttgtgctgccccccagaattctagatgaacagcagcgaattgtgagggtccttgccttgcagttttcctctgttgaggaactcatcctgtgaaagtacccgtttcccaagaacttaccattgggaggtagagggaagcaccctatacaggcaataactcaaatttgagttcattctaaccaaaactggcctttgtttccattctttaaaggaacccacaatgccctataggttatgtattcattcaaatgacaatcccagtatacaaaacttgattgtctctctgtccatgcacctcctgtcctaaatgaagtggacagttaacacctgttctcaaatactcacatggggctgtttaactgaaataaggcacttacagcagctggccagatgtcttcacctcaaaaagacggtttcaccctgcccgttgacaaaactggctcaagagacatgacgctggaaaccagcatagttacaccatcgagggttgcacagggctgaaagcccttcaaaatctgacttagtatgtctgggatgccaacagtacggtactgtaacaaatgtataaaagatgctattcccatctcatgtcacaaaatggacacttacttttattgtagaactcggctattaatattttatcatagattgttttatatactccattgtaagttggttattgtgtcggatgcatactttgaaacttaacttttttagttcctacataaggaaggcttcatgaggtggaagaagtgagctgaattttactaatttggtaagcaataagaaggaagaaaggccaaaaaggagaataggcagggaaggggaatagggtatgaagaagacaagctaaatcagaaaactctaagaaacagactgcatataataaaggaaatgatgaatacagcactggggatgacaacagaaataatgaagtcatcacagtgggttggctgcagagagagaaaccaagtttgaccagagtggttgtagtgtggaaggcaggaagggccagggaagaggtctttaaagaatatattttctggcaaaggtcaagccacccaaccaatagctttcagactttaacaggagaggaatatcctgggattcctgtttagaatacagattccctggccccgtcccaggacagtctgatttagtgccttaaatgggaccaggaggatgtgtttttaagaaggtcgactgattctgcattttgtacagacacaggcaatactcagacctcacttcgagaaaactctataaggaaagcaaagaaaatcttgcgcattgtaacagcagcaacttattagaagagaacagaggttgcttgtaggtaaggaatatgctaccttaacgcaagcaggaaacaaggcagattgacatagaattattgctgcacagacagacaggatgtttgagatgctgcagggatagtggggcaagagaaaagatttcttaagtttatttcccagatgtaaatcagcctttgccctttgtagctagagacatccctcaccccaattgaagaaaaaaaaaccctcaaagaaacctatgaaaataattaagcatgataattctggattatccttaattagagggaagctctagtgagctccgagctttggagggtcatcatacatttgttgcaagtgatctgtcactgttccacgtgcacattattcatcccttcacctctgatcttcccctcctctgagcacagccctctgcaaggaccctgcacttaggctgcagaataaaagacatcccctcacacagctcctgctgccactgtagatgacatgtctcttctgggggctctaagatggagaaaatcttttcctctctctctctctctctctctcattctgtgctgactccttggtgccaggcccatgcctctgccaggagcagcagcctatctctcgtggtgagcccctcaaaggacttgggtccttgttgcaggagcaggagcaggacccaggccagaaccgacagacttgaagcagttctgatgcccattgtaggtctgaggattccagccacatggaacaagaagagggaaagcaagggaggaaggaagggaggcttggcaagagaaaaggaaaaagccagatcaaacacaaagggaagaaaggagccagacaaagactgcggtcatcccctcttcttctaagaaagacaggtcaacaaccatctctctgcctctttgagactttgttcacaaggcccgtgcagaaatcatcacacctcctacaacttaggctgtgaagcctttttcgcgccatgcagtgccatcttcctttctcccgccaaagtgctgcactctgcctttgtacggggacgtgccactctgcatcagttagttggttgtatgtccacttttcagttagcacagatctgtcttcttcctggtaccccgatcatacataggacatcactgttcataggctaggtgggtaataagtacttactgagttttcaaagttaaatcattcttttctccctggatccagttccttaagttgtttagctttatattaaggaagtccctgaagactctcttttaggttagggaaattgaaatgcattttaaataagcaccatctcaactgatataagataattagaatacaaattatatattaaaaaaacccacaagtatatagctttgaggtcagagctgggtctgtagtccagctctgtcactaattccttggtgaaagtcaggagacttgtaccttttctctatacctctgtttcctctatttgtacattaaggataataataccccctttctataaggtcattatgaagaggaaaaaaactgatataaaagtacctgatagacgtaaatgctcaatacatgttagtttggtttgtttccttcccttttaattttggagtaggccacttttggtggcttatttttcttttcctagaaataacatttctagtgggcaaaaatattaagtagcacccagcgtttccattaataacattaacaacatgttaaagtttaaaaatgataaggcttagcatggcagcctgctacccatacaaccagtcatgaggtgttccacatcccagccctgccttttatttcattttgatttgtttattaatcatcagctgagatttttgacaaatacggttaaaaatcaaaagctgtgctttggagacattcatgctacttttacttgtattaaatttgcaaggaaaatttatgtgtaagtaaatatgaaaactgtgagtcactgtgaatatttgtatgtattctcataaaattatcttggcatccttatattttgttgtaatgggtgtcaaggacttctctttgctctaaatgggaatatttactgattaagagcttgctgttgcattctcctctgctataacctgaggaaacagcaccttttcacctttgaaaccagcgtttccatattactcatgccagtcttttctcactaattttatgattataatgaggcagtggtgcactagttagcacagatgaccttctaattgaaagactgtaaattcaatctccatctctgggcaccgacagaaatttaaataaatatagctcctaaaacccttgtgatgggctggcctagtgaccaggggctcgcagagcccaagtcatatgtcacaggggaccgccggcaacttctgggtgttaactacaggagtcgttaaaagtaggttgccctcacgaagcaaaacgagatgagggacttttccttggctctgattcaggcgccatgccttggttctctgtaacatatgctgagttgcttttttgtcaaactgcttcctaaaactggagtccgaacacgaggggaagctccattctcaaattggacttaagcagaccagaaaagtcttatctaccaggccaccttttgtccactgccatttatagatttagatgcaataagctgtccagggctatgttgacatcatccccttgcttgctgtattcacccccatttctcacccccgtgaccttggacagcaatccaatttaggtttccaaagtgaactgccctgaggatcaagatgggtgtgaaaagctgttttaatggtcagtccgaggaaggaatccatggagctgtaatgctggcaacatttgtaccaaataatggagcacttgcccttggcatatttttgaccttccattttgcctttaacactgttacttgtgtgtacatgtctcttatcgtgagccaccttgaatctctttgggaagcaagttgcatataattttttaactaactagctgctttaaagtaggtccctggaccttgccaacagctacctaaaaatggccccgtattgctgacaatgccttaaagctgactcttgggttgtcagcatggtgcgtctttatcctgtgtatatcacagaaacacaatggaaatttcccattgcctttaaagttctgcattctgtatatttggttgttagacaaatagagcaagctttgccgacttcattttcattcttggcagcatgtttttatcataaggcagatagtcattaatttacagaatcaacgctgggaacagcttttgtgatctcatattaaattttcccctgaatccgccccttggcaaaaattactcacatcgttaaaaaatatttaattaggctgtagtttatacccagctcactggggaaatgttggaattaatatgatttgcatgaattctgtttctctctttctgtcagagattagttttgaattcagttcagagggtcgttgacactgccaaggactcacaatcgtgaaggtcaaacaggtagcaaatacttcccttgggtaggttccctgaaaagacagctcaaaattgcttttaattatgggttacctgaaaggccacttgctgtttttatttttctacagatccctgaaacactgcatgattggaagttttaggtaaaccattttattcctaactaaaacaggcccgttattgtgtagaaatagatgtgcctaaaggtgtggtccccaaatgattttcctcgtaactcactgatttctgtggtttgttcacaaaagagaaagtctccccaccttgaactgggatgtagagatgctggataaaggcagtcttataagacagccagcagtgagtaaattttctacatagtaatgcatctgcttgcttaattatctttcaaaagataagatacaatgtttagttatgcatttccttgtttattcttccatgggttaggaacaaaaccttagggaatccacaatcctgtgccatttttttttttcaaaagaaaatttaatggaatatttaattaataatctaatcaatcaattaatctcagttacataagtgttgaaatctaattctttttcacagctatatcaataaaagaagtgaaatggctgcccacttatcaggataataggaagccattgcagacacaaagaagaattgaaattgtattaattctgctgcactggttctgatttgccagtgttaacaaagtctttccattttagacaagtttcggttcacctgctgggaccaccaggtagatattttatgtcctaaccttttccagtggtgaaaaaaagtgacgattagatttttttaaagaaaaattcccaaaaatttaggctctgcagctctaagtaaagacgcattccaaataataaaagggcatttaacctctttagacattacctttgtctttattgttaagtttaaaaattataaaccatctgccttcaaagcatgtatagaccacaccatgctgctgactagccaactgttggtgcataaatatttatatcccaagtgatttctatggggcttctttcaacactggaaaggtgagctgcagtttgaccctcacttcaaaaaatcccgagtcaagtcactcacagggagtggatgccaggtgtatctattgcaatcatagttttatttgatgacactgctcatgaagatcaccacgtgttcctgattacaaagtgttctaaattggaggaaacttaaaatgggagaaaggaggaaggctagaactttctgaatacatataccctgctggacactgctataggtgatttacacacacgatctcattcaatcttcagaacaccctgcaaggtggatgtaactgcctccactgtacggatgaggaagataaagttcaaagaagcagagtagatagatcttttcagttcagccccttccttttatacatgaacctggagggaataatacccacctaatcaacacagggaggtaatctcaaagctgagactagaacccagttctcctaactacctgcatagccctcaggcatgtgtctgcattttcccaaatacaccctgtgaccagctcaagctgacaaaagtattaaataaaaactagcccaactttttctctatatacctttggctcttttttttttttttttttttttttaacagcaagtgaactcttttgcttttcccagataaatccaagcatgcatgtggctttgtgaaatcttttaacacaacagggcaatgtacatccagctaactggcagaaggcaattcatataaaaacttaacagcacttttctactattcttgcctgaatatatgaaaaacaaaatatatgactgtaagagaatgggtgagagagaacagtgtttacattaccggaaattttacaaatgcacgtagcactagggatattaactcagcttggaaaaaggaagtggatgactcaggaagcccaaagaatccttttccatttagttttcttcattgttgtttgctttcgccttgttgttgttttgggttttttgttttgtttcgtttctcctgtagtggcctttttgaagagtacaagactgcaagaacttgtaccccctcatatctcttcaaggtagtaaatctcaatatttcatcccatagtctcaaaaaaccacaaagttgggtaaaagtcataccgtttgcatcaagttttctatctatttgcaaacaaacatcctcttttccttcactctgagcagaaataaattatgggaataactcttgaggccatagtctaaatagggacattctgaggccaccagttttctcacttggtggttgtgccccaccgcattaccagatgcctctcttgtctctattcctactgctgtgctactgaagcaaaaaataagtttagtatcgaatttctgttcagtcagactttccacaactagacctacttgaaaagcattgtgtttgaggtacactgcaaacagaagactagtagtttggggactttcttaatgattggcacaattaagtactgtgctaactgtgtggcatgtattggtttctcttatcaattgtaattcagggcaaggagtccacgtgggtaatgattgttgttgttcttattattacagctgccagttattagctgcctaacatatgccagtcacattattcatcttatttaattctctcaacaacccaagagtaagttgtaaaagtctcattttacagatgagaagatggaggcttacagttagaaagtaggagagctgagattccaactctggccttttcaactccaaggtcaaaatgcacccttccttcaaccaaagcaatgtctgaaacaaagatcactggaatgtgacacagactgatttcttctttttaaaattttttaattgaaattgtgtgtatttgaggtgtatagcatgatgttttgatatacatattcataatgaacttagtgaactgaggttactctagtccagctagagtttacatctcttttcacagttacctttctttggtggtgagagcacttaagatctactctttgcaaattttaaatatacaatacagtattattaactgtagtctccatgctgtacattagatctctagaacttattctgtgtatctaaaactttgtacaccctaaccaaaatctcccatttccttcacttcctcacccattatccaaagaaaatgaaattagtatgtcaaagagatatctgccctttcgtgttcattgcagccttattcacagtagccaagatacggaatcaacctaagggttcatcagtagatgaatggataatgaaacacacacacagaggaatattatttgcccttaaaaaggtagatcctgccatttgtaatgccaatgaacatggaggacatcgcgctaagtgaaataacagcagacacagaaagacaaatacttctatgtgaaagctacaaaagtcaaattcatagaaacagactgatttatagccttgattgtgcatctgatgcagctgtgagactgtaacaagcccctaaagttctgaatctcaggtctttagtctgacatacaaatgataacaacacagggtcccagagaggagagaggccacatacagaaaagccttctaaggtcatcagtttaatcaaaccaacaagcatttattgagcacagtgctaggtgtcttgggaactataatgatgaataggatatcatcccagacataaagaagcctgaattctagaaaagactttaatatgagtatacagttaactaagtagaaagtgtagtttcttaagttcctggaagaagtcatttccatttcctctccaactatgacatttttgatactgaaggaaaaaggacagatgaaaattgattagagaaagttttcctacagcatgtgtgagattgctttaataaagaggggaagaggaagcgggagtcaggctctctttccactttactattaatacttccctagacccggttgctggtgactcaacactatgctggctgcccttggcaggagtagtcctcatggatttatttttcacataaaattgttcaaatacacaggcattaattatgcagattatgtaaaaaaaaaaaagataattgtgttactcttgcagtgggagtggggtgcgttgcagtcagtggataacatctagttctaggtgagggatgtcaaattgactgcaggaagcgatagaaatgccaactcttccaagtaaatatcgccacttactccaagcgcacgctcctcgaagctcctacaaatcttaggtgtcgattttctgggatgccagccacactcctttcccgcctctcagcccgaaagggcagcaagccttgcccaagctctttctgctatggtttctttcacctttgtggctgccactcttataataagtagacactgtagaaattgaggggaactgtttatgtgcttagaagactttatagatgtttcctaattcattctcctcatcagaggaagcaaagattgcctcttcaagacaacaagttaaaaactggagagacagaaaaggtacagtgacttatccagcctcatttcaagaatcagtggtgaagacagatagaggagaaacaagaacagacttttgtttcccaggctaacatttaagccagtagtttatattatgactttttatattaatagtgtcaccttaacttagttggtctgtttctatctttttcttctgttttgaaaactgatttcacatatcccccgaggtaatgcagtataccagcaagtctaacacagtggttctccctctacttccatcaataaaacacgttctttaagctaaacctttgggaatgaccaaaaccaaataaaacacaccagtatagagctgctctagttggaaagtgagagagagaggcctcagaggtatcccagggactccttaacctggagcccataggtaggctcatgtcatctataatttcctcaaatgacttgcaatgtcagggggaggatggggaaggaaaccacactgttcattagagatgcaaagactctgtgatccctgtggatcaaaggcagctgtcttttggttcagcatgagacccatcttcatcccccactaatagtgtattaataatgctcctgaatcaagttgaagtggttttgagtttctaatggctatgccgtacgtttgattctaaatctcaaaagatcagattcaacagcccaactatgggctcctgttaatataatgaataggtaggcataatagataagctgccatattactctgggaccccaaataattagcaaacccttctgaatcacctcatttctcaatacaatttcaatgccgttttttcacttacttgctcattcgttcaattaacacatagaacattttctatgcaccaaggtttgtagaaatgaattagatatggctgctgccctgaagaagcttacagtcaagtgaatgaatatacacttacacttaatatacgccaggtttcctttgttttacacattgtatgcattacctcatttaattttgaccacaggaaggtagatgccattattatctttactttataacagaggaaacgccagagtaacttgcccaaagtgggtaatggtttcattcccaagccatttgcctctagagtctacgttaatgaccagtgccttctattaggaacatgtaagagcgttagaaaatctcccaggacatagctcattgtgtctatacaattagccatgaaactggacctgactgtcccagaacccaaccaaatattctagtccaacaaatgtaccttgtttgtctggctatcctgggaagtcccttttagcaaacagagcaagaacttattagcctcaaagacagaacttcatttctaaatgacacaattaaaactagaacaagagacttaataataattgtatacagtcagccaaagccattagattgtaaggaagggctgactgtcaattctactaatagtttactagaaaccatacctttaataatctctatttcatctaaggaagcaaaaaaaaaagtagcattagagtgataatgactcattagtgacttgaaattgggattctgttgctttgttttgtgttgtgcttaggtagtgctgttcagacaatagaatacatctcagaaaaatcaaaggatggtcaatggtagaaacaaaaagaatccccaggtataaaggaaccaaatggacttcgctaaatgaaaacccctgagcattttgcatgaagaatatgtaatcaccccagcgccccccaggaccactctcctgaggctcacaaagggttggttgttccacatggaagaaatgcatgagaacagtaaagtgtatgcatatcacaagagggacagactttctagcctgaggtctagaatgaaaaaatgttaaggtaaaaaggcagaaatgaatacctgggtgctaataaaaatggacagtttgcccattgcttcggtgatgccaaatggatgagctaagaaaacctgctgtgttctctcatgaagtccccgatccccattaaggaaaatgggtatgagctaatcatctctaacaactaagtctgccatgtccaagccatctccatcagttccttctccagcttttatttctcataactcatttctaaactgaaactgttattcctgaggcttccttgttcttttatggataaagaaagagctgcagttgagtcttcacaaaagttgcccgtaaatccctgagtcatccttgttttgattttgttttgtgtttttctatccctcttggtatggattgcatgaaattttccatttgcaaaagggtttaatcaacagtaaatgttttgaatcagattaaaaacacaaatactttaagagctatgtatttattctgtcccgctagatgcagtcattttatcttgttgttctggagggcaacgcaaagccatagatgctctaatgaattccttgcaacaggcaggtacactgatggttaatagtaattaacgtttatcttaaaatatcccgggttcttctgcagaattcttcccctgctccttgacacatcaaaaatgggaaatcatctatgagactgttttattcgtctctgttttcggacagcacatttacatactctcgaaggcaatcaataccagcaagcccaggacttccaagagtccttaattatacacctaagaatgcatatgtattcacatgtaatacttgtgtttcttcagtgtttcccccacctttttagctgatatgtgttaagagtctttctttgaaagcgaagagtaaaataaagagaataacaagaaaatacacaatgtgttgttaaatgtgatggcaaaataattttttttaaaaagaagcttcagtcagtatgatcagtaaaaggaaaaaaaaaaaaaaaaagacagccggcaaactgtctatcatgtgatgaaatttgacagtagggattatggctttgatggaccagaacagctaatagaagaagctgacatttttgaaaccctgctaattaagggttccttccttaatattaaaataaagtctttgtctgggttttatggttggagaatcaggtgttttcattaatatatgccagtcagtcttaataagcttggagggcagaggaagttattattgagtgaccttctacaaaataagcatgttgctaagggctctaaccctgccccgttcagactgatgaatctcatttccaatgcaaaagcttcacaagaaatccaagtattctctgcgcaatcacagaaaataatccttgtgtctcctgtaatgtccagaattgccacttactacactactactgtacaatgaatattacaatacatattatttttctaccacaattgtctacatttctgaattgcccagaataggaaaacttattgtgaagacacttgtattgaaaagtcagctcattttaatacttttcaaatagtcacctactctgttcatgaattatagtgctcacaatacatctgacaatactggctttgaaaaggagatatgtctatattattacatattcattttcaaatagatttcaaacagattttaaaccattcattgaaattcattgaaatgataaattcacagttggattttgattgactcttaatccaattttacttttgataagttttcacccctctcttcccacccactcccaacctttctcaaccaatgcatttttgctcttctgttggcttttaaggcaaaactgaaggggtttggtaaaactggaaggttttgataaccacatgtaaagcttgtcaaaatgaattggtaaatttaatcaaattcagaaggcacaacactataggtgatttttctggctaatttccaatgtatcagtgctctcttatggaagcaaggtttatggtagctgttcacaacctaaagcaaaactttgaaagagtctttcagttactcagccatgccaccatatctagacggcatggaaatgcgcagctagacaaggtacttggtgttgggttagtagatcacacaggttgaggttttgtggttgcccagttaaaagggcattattgaaatactcttcatcttgagctctttctgcctgccctaggaagaaaagttggttagcaccactggtagcaccactgttgctggacttgtggtcaagtaaaaagacaacaaccctactgagttctcttgggagaaggaagaagctagatttaaaattccaaaatgtggttccacatgaaatttaaagtagttttttctaattctgtgaagaaagtcaatggtagcttgatggggatagcattgaatctataaattaccttgggcagtatggccattttcacgatattgattcttcctatccatgagcatggaatgttcttccatttgcttgtgtcctctcttatttccttaagcagtggtttgtagttctccttgaagaggtctttcgcgtcccttgtacattgtattcctaggtattttattctctttgtagtaattgtgaatgggagttcactcatgatttaggtctctgtttgtctattattggtgtataggaatgcttgtagtttttgcacactgattttgtatcctgagactttgctgaagttgcttatcagcttgaggagatttggggctgagacaatggggttttcctttttttttttttttttttttttttctgttgcccagactggagtgcggtggcacgatctcagctcactgcaacctccgcctcctgggttcacgccattctcctgcctcagcctcctgagtgggttttctaaatagacaatcatgtcatctgcaaacagacaatatgacttcctctcttcctatttgaataccctttattttttttctcttgcctgattgcgctggccagaacttccaatactatgttgaataggagagagggcatccttgtcttgtgccagttttcaaagggaatgcttccagcttttgcccattcagtgtgatattggctgtgggtttgtcataaatagctcttattattttgagatacattccatcaatacctagttcactgagcgtttttagcatgaaggggtgttgaattttatcgaaggcctttatctgttgagataatcatgaggtttttgtcattggttctgtttatgtgatggattatgtttattgatttgcgtatgttgaaccagccttgcatcccagggatgaagccaacttgatcttggtggataagctttttgatgtgctgctggattcggtttgccagtattttattgaggattttcaaatcgatgttcatcagggatattggcctgaaattttctttttttgttgtgtctctgccaggttttggtatcaagatgagttagggaggagtctctctttctattgtttggaacagtttcagaaggatggtacgggctcctctttgtacctctggtagaattcagctatgaatccgtctggtcctggggtttttttggttggtaggctattaattactgcctcaatttcagaacttgttattggtctattcagggattctacttcttcctggtttagtcttgggagggtgtatgtgtccaggaatgtatccatttcttctagattttctattttatttgcatagaggtgtttattgtctgatggtagtttgtatttctgtgggatcagtggtgatatcccatttaccattttttattgtgtctatttgattcttctctcttttcctctttatcagtctggctagtggtctatttcgttaatcttttcaaaaaaaaaaacagctcctggattcattgatttttttgaaggggttttcgtgtctctatcccaaaaaagagccttcatagccaagacaatcctaagcaaaaagaacaaagctggagacatcatgccacctgacttcgaactatactacaatgctacagtaatcaaaacagtgtggtactggtaccaaaacagatatacagaccactggaacagaacagtggcctcagaaataacgctgcatatctacaaccatctgatctttgacaaacctgacaaaagcaagcaatggggaaaggattccctatttaacaaacggtgttgagaaaaccggctagccatatgcagaaaactgaaactggaccctttccttacaccttatacaaaaattaactcgagatggattaaagacttaaacataagacctaaaaccataaaaaccctagaagaaaaccaaggcaataccattcaggacataggcatgggcaaaggcttcatgactaaaacaccaaaagcaatggcaacaagagccaaaatggacaaatgggatccaattaaactaaagagcttctgcacagcaaaagaaactatcagagtgaacaggcaatctacagaatgggagaaaatttttgcaatctgtccatctgacaaagggctaatatccagaatctacaaggaactcaaacaaatttataagaaaaaaccccatcaaaaagtaggcaaaggatataaacagacagttctcaaaagaagacatttatgtggccaacaaacatatgaaaaaaggctcaacatcactggccatcagagaaatgcaaatcaaaaccacagtgagataccatctcacaccagttagaatggcgattattaaaaagtcaggaaacaacagatcctagagaggatgtggagataggaacgcttttacaccgttggtgggagtgtaaactcgttcaaccattgtggaagacagtgtggcgattcctcaaggatctagaaccagaaataccatttgacccagccatcccattactgggtatatacccagaggattataaatcattctgctataaagacacatgcgcacacatgtttactgcagcactgttcacaatagcaaagacttggaaccatcccagatgcccatcgatgataggctggataaagaaaatatggcacatatgcaccatggaatactatgcagccataaaaaggatgagttcatgtcctttgcagggactgcatgttctcactcataagtgggaattgaacaatgagaacacatggacacagggaggggaacatcacacacccgggactgccagggggtcgggggctaggggagggatagcattaggagaaatacttaatgtagatgacgtgttgatgggtgcagcaaaccaccatggcgcgtgtatacctatacaacaaacctgcatgttctgcacatgtatcccagaacttaaagtgtgattaaaaaaacaaaacaaaacaaaacaggatgactttgaacagaccttttccgtaaaaggtgacattcagtaattgcattgtttgtaactcaaaggataaatgcttgagggaattgaaaccccattctctgtgatatgctcattccacattgcatgcctgtatcaaaacatctcatgtaccccatgaatatatgcatttactatgtagccacaaaaaatttttaaaataatttcagaagttttttaaaaagttgacattcaaacccactgcttaaaaagatttacaaataaattcttccgaattaaacctcagaaaaaataattccagagtgtggttaacagagcaaatcctgtctctaattaattaattaattaaaattccaaaatgcaccgtgggttttgtgttcacctactgggaaaaaaaaaatcgtccaccataaactgagatcattccagtgtagcatatacaggaacaaatgagataaaaatcatgggtccagagcttaaatgtgtaggataagaagttagctcaaagtgtgccaattatctaggcctatgtctacagtgagacaattgtccttgtggtaccaacttgagaagaaaaatgagataggacatttcctataaatgattacttgaacctgttctttagtattttaaaaggaaggggaaaacggttaatgaacgctggcatggatctatctatctctttagggcctaaatcaatcaatcacttagtgttagtgagcctctgcctaatgcttccccaacatcctaggcttagtccaagaagagtgtaatacaccacccctgctcttataagctccagtgcagttaaaaccctcttgtgtcctggattgctcctatcttttcatccaagccacctgtccttactcattcttttctctgtgaggagtcagaatgggagttactgtcccagatgcttttggttcacaaccacctctgggtgcagacatactagtgctactcaaagtgtgaatcgtgaactagcaggttcagcatcacccaggagcttcccaaaaatgcagaatgttggcccctaccccagatctctggagccagaatctctgggagcccatgctgcattttaaggaaatcctaaaggatctggagaaatttgagaggcagtgacctacagtagtcttgtcaaaaattattcatctactacattgtgttgtcatattttttttcatattatttgactttgtatgtgtttttcttctctctccaaagtggactgtaagctacatgggggcatgtgctgagtttctatgtttcttttaattaattcctaaaatcccaaatgcaatgtgttacagggaataaatgatagataaatacatgattgactaattaaatgtactagttcggttcttttattccatagacatttctttatttctgttatcttttactatcttatacctcttccctttcatgtcattttcatgttctactccaaggattcttgcttctagagcatcactgttcaacagaaacacattgcaaacccacatgagtaattttaaatttttctagtagccgcattttaaaaagtaaaaacaagtgagaagaatttcaatgattagctatttttattcaatttcacatatctaaaatattattttaacatgcaatcagtataaaacatgacagtttgcattcttttctttatatttttgtacaaagtatttaaaacctggtggtaatgtatacttatagcatattacgaatcagagcggccacattccaagcactcagtagcaacacctgactcgtgccttccatatggggcagcatagctctagagactattcctggataaacagcaaaggtgcctgaaactcctgaaataaaatgccagattacatgtgtgtgattacagcattgttctggtgagacaagacatagaacctatcaggttctcaaaagggtttgctccctcaccaccaccacagtcctctcaaaataccctaagatatacaggattttagcctctggaatgagccatttcttttgacccatttttttctacttgccagttctatttacattctctatccaagactaactcagtctgttattaaacagttgtgaatttaacttattcctttaaaatagcacctagagagtgtttagggtattgacttgctttcatagaagataacctcaaaccctaccacagttagtagttacaataaccaaaataaaatagcagtatattaggcctttttcttatggtaattcacaagaaataaattatacaccatggccatggtgcacacatggtattcgggagggtcagtggttaatcatggcgtgaagaattttgttccttcttgttctcctagtggattaactccccaaataatttcttaacatgggctaaccacctatattctacagtggctaaaatattttagtatactttgtggttttccaagattttttttttaattttaagttctggggtacatgtacaggatgtgcaggttacgtaggtaaacgtgtgccatggtggtttactgtacctatcaacccattagataagatttttaaagaccccctcatggtgacacggagaaggagagccagttgtttcaaacacagctgcaatagcattgacatgatgctccaatccgaacaagatcctcctttggttttgctttctcttaaagatttcttgaggtctacaaacaaattatctttgttaaatctttctggttttgctattgttttttcgcgcaacagtatcactcttaaacattgtgactcaactcctggtgagaaccactgttgctgatcttccaccatacagtagcccctttgaaaacactgaggaacgactaattgtatgatttgtgcattttattgtttattattatttggatgtgtaattgttatatgggtgcattaagcatatctaaggttttagtcatataaaccacattattttactgtgaccagaataaaattactttgtagctttcataacacaaatggaaaaaatcatccccagaattattatggttttcctaatccagttacctttctttaaaatataagagctgggctggcgaggtggcgcatgcctgtaatcccagcactttgggacgttgaggcaggccgatcacttgaggccagcagtttgagaccagcctggccaacacgacaaaaccccgtctctactaaaaatacaaaaaaattagccaggcacagtggctcaatacctataatcccaactactccagaggctgagaccggaggatcgcttgagcccaggaggcggaggttgcagagagctgagatcatgccactgcactccaacctgggtgacagggcgagaccctgtctcaaaataaaataaaatggctgtttagaatcagggaaatatttaaatttcaatcttacaagcattttccactctttcttattcatgcaatcaaaggaggaggacaaaattcgctatgaaaacaataacaaaaattgagacgtattgatactgaagtccggctatgcataacactcatctcaacatgtatccagctttaaatgacaaatacggaaacatgtaaaatttgaggataatggattaactatgccaatatcaaggattttatgttgattggtctccttaccaccaaggtaatgaagaagctttgaaagtgacatctttcttactattcatttgatctccagaaaaaaagaaaccgacttcagttacttttaagactgttaatgtttctttcttggcatcgtttcactttttactatgatgtaacctctaacagcatccttttgccttctcagcactgtgataaatactaaaaagttggccttttctcccctataggcacttgaaaaattcaaaactatgggaaccttgtaaaacaaggttttaaaatttcttggtttagtcactttcacaaatccctgggctcattcctgtgatgtaatatcccctcagtattaaggcattctctaggttcttcttttaactgatgtctcttaaggaaaagaaaaggatattgacacatgaatactgttctaaaaccactgcttgcatagtatggtgtgatggaggtatacctgatctaagattacaagaaaaaatgaaatgcagcgtataatttacccttaaacaacaaaaatgggggagatcttcaaagagtttgtggacctgttttatacacacgctatttctagaagtatttaaacatgctcacttccaaataactgggcccaatgagtctcaattagtagctgcattttcttctttatttcctctttgactctatttccccgacagtctgctttgttctttttcttctctgagaactaggagacccactgatcccctggaattatcttctggcacatcttaacgttcagaactggttatgcagtatctcttgtttttgttgttgtttgtttttttgggggttttttgtttgcttttgtttgtttttgagacagagtctcactcttgtcacccaggctggagtgcaatgtcgtgatctcagctcactgcaacctcggcctcccaggctccagcgattctcctgcctcagcctcccatatgcagtgtctctttgggtgctgcggttgcaattttcaagtcaggcactcccggagtgatagaaaaatgtacgtacaacaaaaaacgtacttaatggattcccatgggagccaaaatgtttatttttgaagataaaataaacacatgatgtggtatcttctagctaaaattcttctaagggaagcctctgttaacatatctgtaaaaagagagcggattcgtgttcttatttgatgacacaggaaggatttttcattctatctcatcattctgatatagaacctttcttcttgttctactaatttatacacgtatttctgtaacagaccgaatgcttttatgtgcttttcttcagataagtcagcaaatacatagaatgagacagagcagtaaagaacatcaagtttctgtcaaaacagttcataaatattcagtggagttctgcaatatgtaggaagttatgaagatggcattaagataccggtaaatccaaagaaaacctatgctaatcaagctatcatatcttattatattttattctcactttattatccttcaataatataaatgtgaccccccctcaaaaaaaaaaaaaactacaaatcctgacctgctgtggtgagatagaacttccacctgatcctggctcaggattttctaaccaggatgtcagggtctcttgctagatctgaaggcctcacctgggaatttagtttccaagccacttaccacaaacagagtcctccctcaggaatgacctttgaatgaccttttattcagatattgctagcactcactaagggagtggggcctggatgcagaaggactcctgagaaagagattaactaagagcccttgtggtaacctcaatgccctcaaagtattttttaatatcagccttacaaaagctttatgacattctaccttaaacagtaggttttaaatgaccctttctattgataaaaatcaactttatattgttcctaagactgaaatattctaaaagaaagaaatatcttgaaaatagatgtatggcctttctttatctaagcattctcttaagttgttccaatatggagataacttacaagatcactgcctactcctcatctgcaccaaaccccttcaatcaaagaagcactgaattcaatgagttgcactgttagtacatcactgtagttaaaaagtattgctcactccaggggagcaagcaaaggctattgacatgcttgcttgatgtatgaaaagacaaattagcccccccatcctatctaccagcagggtacaatgacctgacatggaaaagtcagctcaaaccactgtacaatatatttacatttttttccaggaaacttcagagttaccaaatcagctgtgtctagtgtgcaaattacatgcaagctaacagaatgtgaaataaatttgagaaaggctgtgtggtttagcttgactataggatattctggatggcactagtgactatggcttgtcctggaggaatctatggtaacattgggcagggaaaggcaggaaaaaaagagtttaaacaaaatgctgtttctggatgtgattatttattacttgttgcctatctatctgctgcccctgatgcattctcagctgttttgtaatacactaagcaacgtgagagagtaagtaagttctcttccagagtcattcagctggagtaaagttagaccaagtgggtgaagttggaaacagtcatgcttcctccttcttctgctactagagaaacagttcaaagatcaatgggtctgttatcttgagtttcataaacagaacatggatttttgaagttctcacagttgccttagaatgcaatttgcactaatcagaagaacacattattggaggggggaaagctctacttttccattagatcataattaaggattgaagacaggaccaataattaatataaaatgaaatttctctaaatttctactattggtgatatcaagggatagttaagaaatattaatttttatggaactatgttacagttcaaataatgaagacaaaagcgtgttaacacctgaaactaaccagttaaacagagttttgccgtagattggaaacaagtgggttatgaaagacagacactattctcttaaagagtttcttaaaacctgtcccttcccggcatttatacaatcccatcctcagctaaactcaaggccttactgcaaatagatagattatgatgctatattataatacattttaaggaataaataatgttattattacaatgccattatactaacataaaagaaccaccttaaacttttccaaatcaagtacaagtaaaagaaatttttttttcaggcgcaaatatccgttctttattcattcaacaaaatgtttgtaatatacctactaaacataatagactagtcctagctctcagcaggcacatgttttggaagaggtggtaacagaagatttaaaggtacctaattagcattggattggagctctatttatttttccaacctgaagctaacatgaagtaatgtctgttcatcaagcaaaaaattctccgtcttgctgtctgtagtctattttgaggcacagaatttagtagcaggaaacatgagttctagtctgtctcacctggtgagtacccataagagagaaaaaaaaaaaaaaatcagacaagggtttagtgggaaaagtggtggactgagaattagacagttgggcttacagccctgtttctaccactaaacagctgggtaaacttgaacatgcattttaacttctcgggactgtagggctttttcccattaaatcaggaggtattaatagatggtttttaaggtgtcttctggctctaaaatttaaatgaaatgaagtcaaagcagtatgagaaatgttgaaagtgttagatacatgtaagatgtgatgataatgatgacaatgactcaggtgcatatataagttgacctttgtctaatcctacctctgttttggtttagtacacctcctttagtgccttcttttggccaaagagttcaatggcaaagcatctccagctccaggggattggcaggctgcctgccctcagcctcctcccttcatggtgttcagtgttctttcctgaataaagcaaggctgaagcacaggggaactcagaggtctctgcttagcctctatggctgccagtgctactacctgagaggtaataggtcaagtgggctctgaaccaaattctgtttccacccttggccttttccagtattcaggttcttttgtaaactggacatgatcataccagttcaaaagattgttatgaggattaatcaaagcaaagcacaaaaattagtactttttgcacatagtggataactgccagtattgttattgttaaggctgaaagcatgtatcaccccctgctgactaaaatgatgtgccaaagtgggacacaaaattacacaataatatacatttcttcatgtcattcatcctgatccaccaaacagcaacaacaacaagacatgtttgcggtgattacttctcacaaagtgatttcttctgcatagtttcactagattttcaaaattaggctgagaggcaggaagaccaagtcttgtcttcttcccagctctccgggccacagcctggcaccattcccaaggaacacaactccaggggagcatccatgtggaatacaatgtgaatggttctcctagggccctgcagagcagcaatgctgccacttttagaagaggaaactgaagcccagggaggttaaattaattgtccaaggtcacacaactgaggaggaagattctggtcttgaagtcaggttatgagtccaagtagtggggcattcctccacactgtgcagccttaactacagtatacatataaacactatgatagtgtcaaactcccagtgcccacctcgccctcatcattaagctttgaggtatgttggtgggaaatcccatgaggccacagggagaaaaagtcctcaccgtgccctagtgctctgtggcacatcaagactcagtcttgccctagatgtgccatactccggacattattgtataggaaggaagtatctgcacatccgagcaaatcaggatgtggagagagtggcctatttctgctctctataagactggcttacatgaacattcaataaccagctcccctaaaaaaatctattttatctgccatttgtgttgtcatcctatcacaatctatggtccgtgccaaaatgcacattgaagtattaaaggaaaaaattagtttgagaaaagtgacagaaatatttacgaaagtgctacaattggactccatgcaaaacgagagtgacttcctcatattcactaatctccaaacaaaataaccatcatcaagaaatattaaaacacacattttattagttccatttaatttcttaattgctcaaagtcagtttacccatttattactgtgtgaagtgcttagaggcaaggcgcacattaaagggattatttccatgtaatccccccctcccagagggtaagagctgatcactgtgaatcccgatttacgctctgtagcaataacaaatggaggaaatggggattgtaaaatgatatagtcagtggttgggtgatacaggaggagagtgcaatttaatagcaagagaaaaatgcctaattttccgtaaaagttacgcgagcctttttcaggaatagctattaaccaaactgaatttagcctcctgtttttctgactatacctatgttaactgatagatgtggaagatctgcagcctgttaagatgttaatcaaatggagtctgggagtagatgtgatcatattaccgggacttggagttctggggacaagaattgctctgagtattacagtctctgtgacagtttttccaccgccagtcttccctcttgacatgaaagggtgcaggcacgcaggtggaatctggagggatgctggaaattatcctggaaagggaagtgaggtaggcaggggttctaggtaaatatccaccaagaaacttgtgacagtctgaagctctggcagcttccatggtacgtcatagctggcctgaaaccattgcactccggaggaccgggaaacccattagtgacctgggaaagagcttttgcttgtcctattgctgacatatctctccctgttgtatgtgcatgtaatgtagagcattaccactattcttaggagataaaatttagagcattagaggagtacagaggtaaggccagtccttaccagcaacttctgccccttcagacggcgcacaactcagacgcaggggtcatgcctgacagcattaaaatagtcagtgcctctatttcaggctgaaacagttctgatatttgatattcattctctgcctttagagttagttagagagttagcctgattcaaagagtatacaaaataaaacattttttaaaaagccttcaaggagatttgtactatgtatcctattagattgaaggcaaaacaagctgattgcagcagaaaaaaaatatggctgcttcagaccccagctgacctcttttgtatggaaaatccctcatacgattacagagctaatgagtaatttttaatgaaaacattatgcctttgcatatatttgtaagcagcccttcttacatttaaatttacatggaaatcagatgatatgtataaaaacacatcttggaaatctgtgtattttaaggaaaacactcgactgctatctctggctgtttctatagctgttcctatccaaaacccaaacttctcaataagaaaactgtagaattcagtcaatcatgtggttgacaccaaacacgcaagtatttgatgatgcgtggataaaacagctgaatacaaggcagactcgtccacatttcacagaatgtttggctttatgcaaacaacagtgtgtgaggaaaaaaaaaaaaactgagcttaacaattgctaaataaatacatgtgaaaaaatctttctctttcacctcaagaattcttaagtatttgaagatgaagacagaaccaggattgtttctgggacctgaatgtattttcttttctactcagaatctgaatcactgtgttgaatttgaaaatggagaagcctatataatgtctttccttcccaccctttctctcgccctctaggtggagctgacaggcagcagtgtctttgactatgtccaccccggagatcacgtggagatggctgagcagctgggcatgaagctcccccctgggcggggtctcctgtcacagggcactgctgaggacggagccagctcagcatcttcctcctctcagtcggagacccccgagccaggtgggaattgcaaacccagtgtgtgggttggtgggcaggacctttgccaaatgagtgtgctcaagttacccatgtgaagagactataaataggtctaagggtatttaacaattccatgcagcttccagtcccatgcagtaattaaataaggaagagatctgaaaataaggagacattttaataagtataatccagagatctaatttcagttgaacaatacatgtagaaggtactagttcttttagtttctctttcaaattactagagggaacagcttccgatttggaataccctcttcattttattgttaccatggctaaatgtaatgcgtttatttattattcagcaaaatctatggcagaggcattccaaatagtagctcgtggagaattaaaagtatcagggacttgtagaaatcttggtttctttatttttttaaagcatcagaaggtacttgaaagatgtgaacagataaattaaggctaaaaagaaaacagaaatggctacattttaaactgcctttctaccctcagtatttaattagatcaattgtatagaggaatgaacagaggtgacattcctcattgggattccttccaggactcttatagactttgcattcagaatgttcccattttcattgtgttgtactgatgataatttaagtattaggggaaaatccatttataaattaaacaaaatgacttgatatccatcagtcccctagttcatcaagctgttcaaacacggggaagattggctggtcggcctgggtcttccgagagcgctggtaattagatctgcgaaggatttattctttgctgattggggctttaaattaattgaagttccacatttgtggttttgtcctttttgtacttttttagaggagatatttcatattcttgtgtggtggagtgcttggccaagcagcagtggtttaaatgttaatttttctcatgagaagtttaagattttttgatgaatcaaggcctgatttgaagtgcaaagttgtatttgcttacttggaaaattattttttcactcttcaaagatgcttgtactttacttgatctgttgttttaaaatagattcgtaatacaaaagcattttattaacaagaaaaatagaaaaacctatgttaagattaacattaaaataactcaacatacttcgaagacaataatttggcctgcctagaagtaatcacgatatgttttctcacacagaaggaaaaaaaaaaaacaacacacatttgactcttggaagtattttaagaaccaatccattttcctcactgaagttaactgtagtttctagggcattcattattcttagcattggtgatcatccttcttcagtgagccccacacatgagaaaagagaatatttaagattattctttaccttttaaaaatgaaaatacttttgttcaggtgggcaagtgatatattcttataccatagctcactgactttactgagcagctatgtcagcgagataactggaactgttttttagtcaatagaatgttcatatctgggcatatttgagaaacagcacatgcaaacggttttctactctttcatcctgatgttggagaacctcttcctcatgactcaaacacgcagcatgaaagaatttaagtttctaagcctttgtatgagggaaggtcttagaaaagtttgtttccttgaatcacaaatgctcaagtttgaaaggatcttcatgatccttttatccaacctccaacatacgcagccaaatctctacagcaaaaccagcaggcagcctttccagtctctgctagattctgccctgataggaagctcatgaacttgcgaggctgcccactcccttgttgagtagttctcgtagatagttatgcctgatatggagcccaaatctgcttcgctgcaacttcccactgatccaaggtctgccctctgggacatttctgatttactccttcttccctatcctagcttctcacacatgtgaagtcaattacatcagatcctcctttcctcctgtcatccttctcctttccaggtcaaacagtgctaattcacaacccttattcaatggcgtgttcctaaaagcctcaccatcctagtcatcctgccctggctgtgcttcagtttgcagagaaccctctaaaaatacagtgaagagaatagcacagccctctagatatattctgattagtgcaaagcagaggaactgtcacctttctcagggtaggctactatacttctcttaatgcagcctgaggttaaatttggtcttcttggaagctagatcatcctgtcaattcatactgagtttgatgtctccccaaatacatgttgacagtgagactttgggagaaaaaaaaaaaaatccacagcctgtaaaccagttctgctagagtatcctaggctagagtctaaatacgacagcaagcccaaataaatatgtcaatataagaactctcataaatcccatgccttctatgaagccctagcatgcataaaataaccctaggtacactagtagaacacagttcttacagattattacttctagactgtaggagaatatatatctccttcaactgttaactctctcctttaaaggtactctatcaatcatttaacattgaagtgtgattgaaagatactacaaatttacttaggtttccttcccctgccttcaccagccttcctttagccatccttgctagtgagattgaaaactctgccttccacatcacttgacttgggctcatcagctacactcgcataagaagaggccctcttccttgatggtgaatgtgactctcaccagtagagaacgttaagctaccttaaccttcaaagtctgcagtgttggttattttctatctggggcttaaaagagcaatgagattgactgactgctcaaatactgaaaagcagtgtagggtgctaccttaaatgaaatatcttcactaatgcagatgatggctccaagggaattacttaaaaagttcatgtcaggcactacatcacaaagctgcttatgtttcttaaaagctgaaagaattttaacaagatttcctaattcttaataactaacatgaaggaacatttttgaagactgttgttcattgcatcataatctcttgaactctgataaaacacagattcttttttaaacggtgtaatttagttgggaaagggatattgatatatggttattatgaaaatgaaaggactagtaggtatggaatttttcagaagccctgatgtgttcagtgtagcattactaaatgactggaatctaaataacatttggcattataatagaaggaaataagtgactaagccagcctaagaggcagtgatactatgccacaataggaattctgtctctttgaactgtcagccctgagattgtcttgtcctgactcagcctcaggataatggaggagaaaaaaaagatccattgattgtacagcaaacccaaataaatattttatatgtatgcacattttttaacagtttagtcaatgtattatctcagagaaatcttaagtcaggcaaaagataaatgagtggccttgtttaaaatgttataaagtccgagagtgcctatttaggggttgactggaacattttggaagagactgccctttgctgtcctgcaggctcccgcagtatgaggagcacagaacctctgaccaatggcatttggagggttttctttttgcagatctacttgtgccttttcattattactcttaatgattctgccatcttgggattatgagtactatcctcatctttttcttaaatttcagtgccatgccttttaaatgcttagtaaacagaaaagcagctctcaagaaatcctggaggaactttaaaactcttcctatgttgaaggcaaatagtaatattctctatattaggctgtaaaagtgttgtgttttactccttcttcctgaattcagggaaaaaggagtaaagaccaccaccatcccaactatctagaaataaccattattcatatatatgcactacgtaccctcctagatttagtttctgttcctgttcctgtgtatgtaggtatgtatgtgtttggtggggttttttgtatttctttctaaaataagattgtaatgcatatacttctggtaactagctttttcattttcatgtttctctaagataaaattccctttctgtctccagtggtttgcttcccaccagcgagtgatcagtttcttctgtaggacccctgtcaggaagaacatgcctggatcctacttcagagagaactcagccagggcaaggggctcttgtggctttttgggtgggtgtgagttcatagaggggaaaatcaatactgtaccaggatttagacaatttagcaaaatgcatgaggcagtactttggatgatgaataactacagctgcatggctaacccattggttgtgtaaagtatgggttatcatgttttgtctaaattttcaggcaaaatctagcctgttttgtggcattaggatcatcattatagtagtatgatttttatgctattatacttacgctatgtcccgaatgtttttaaggccagcaaaatggaaacagtagagtacttgcctgaatgcaaataaacttcagtttcaacttatgcctctgtgctatggtaaattgctgactactcctaattctacagaaacaggagctcaattcctctgacatcattagatgattttcacagtaagcggtataattagactaacaaatgtctaggaataaccataaagaacgtaaaaatttatctgaggatcggatcaatattttgtataaaaaaacggcttggatatgacatatacttgtacttctatgggtgaattatttaccatctggtatattgttgtgaagggatattttttgtattgggtcaagatttctatcaatgaactgaatttagaagttaggcaagggaaaccatcttactaaccccacatccaaccccagtccccagacaatgtgactgtatctacagcactttctgctgtactgcaaatgtcaaacagaaggtgtaatggatttaatattagcgctggccaaggtgttgagggagctgttaataatgtcactccagttattgatctgaagcctttaaaaatcagggaaaagtgagagatcccctactggggaaaggcatacagtgactgatttttattgccaatatatctacatatagagtagcaactttctggaattatgttatcaccattaatcccattaataactgagatttttggagtcattttatggtgagataatatcatggagactgctcagcatgctaatactaaaagattggaccaagttcttttatacataaatagggctcaaaattcacatggtgagtacagcattcatacaaagtgtcaaatgatagaaagttcattcacactagatttatacttaatgacagagttagagctattggaagggtaagtgacaaacagtgtagtcgagtggtatgctacttttgcctttccaaaattctgaatacaaacaaacagtgtagtgactaacttaacatagaaatggaatttgtttggacaattactgcaccttttcaggaaactgctaatccttcaatctgaatggcagtttgtatgcaatgaaattcctgctttccatagtccccaactaataaatgaaattaaaatgtataatttatgatgaatgtttatcaaactgtaaacacacatttaattgctttccatattcatatactataggcaaagataaatccatcagataaactaccatagtgatctctgatggattgatttaaaatgcattcctactggggctgtagcaatgatcgggacaagttcacgagtcccccaaatcggtctgacttctgttaatacccagctgtgcctgtatgcggcaaatctagcagtcagaaagcagcctcactactaatccttttgtgtaacccaaagagatcatcatttaggcataaacacagcttttatccaaaattatctgtgtttcttaactatgtcatcattaagaacttaccttcttgccaatcctgaaatgaagatgatgggtgcactccaaaagcaagccagtgctcttacaaggactaccttgccaaacctagaatgattcttttgcctcaaaaaagctaccttgatgcagtaccattttttcatgagcgaagtaggctatttttaactgtcacctttatccccagctaagctaaacaagatcccctggaactgccacagaagggaaaaatgttctccattgcttttttctggtatgcaaggcctaggcatacttatcaccttaatttgtgtgtgttcacactttggtgtgcttgtgtgtaaaatgagaacatttgcaaagcaaactgtacttttagaatcttgcctgagggagctaaagtaaaatctctccttcccactaggctctcctggcccgatagctgagctccacccttctaggccagctcccagaaggcacagctgcaaccccaggaatcctttgggacctaattccttgacccacacgttgatgacgcaactagctacagaagggcggcctcccttttgttcccagagaagatgttggatcttggcacagttctgcatgccattctgaaactaactttctcttctctttcaaaatttaaatcacagtggttacaactcagaaaaaaaatacagcttttatataaattaatacagtgatatttgcagggtagcaaatgttttgttgaataatagaagcacaggcctcttatcaaaatatacagtaggttctctcagtttatatgcagcattctttttccaaatcttctattgaaggtttaggaagtcaattttttaaacccattatttttaacagttttttcatacagctttctaggtcataattttgacttctctttgccaatagtgattgatagggatgtattttgcaagtttctacaatgaaacccaagacaagctgttaattatgacctgtttttcctcatttcaaaaaaaaaaaaaaaaaaaaaaaaggtggccgtctctgtcattggataattaaaaattataaattctatttctatagctcttgccttgaacaaagtacaagttatttgcttttaatacattccactgcacagaagtttcctccctgtccaaattataccactctgaattcttcatctgcactaaacagcagacttacttatgaaggatcagttacctagcattgactgagctttgcagggtgcacagatcagaagaggcagaactggctggaaaccatctccacccctagtgagcaatttactcatgattgcttggggaaaatactggaaatattgcttctgtgtaaagtttgcaacttccagttgtcagctctttgccaacagttattcccaagtatagctttagcaacaacgcttacccaggccactgtgataatggttggcattcatatcctcttggtgtatgcagagcacagaaaccactaattacaggagttaattcacaccacatccctctgaggcaggtcagtgtgttatccttgtcttacagctggaggaaaaagtgatggaaattctaagtggctcaccccaagcttcacaggttagttttgtggccaagattagaggaaagggtacaatattagggttgcagcaggtgggaagcctaggaactagatggaaaaagaagatagataggtccctggtaggaattgaaccagaggaattttctccaaggggattctgaagttaagagagaaacgtaactatcctcttatgcacgtatttcattgtgctgtgggttttttttttttaacatagtctcttacttagaactaaaataatctaatctatctaatccttttctttgctctcattatttcttttctttttatttttttgagatgatggagtctcgctctgtcgcccaggctggagtgcagtggcacaatctcggctcactacaacctccatctctcgggctcaagtgattctcctgcctcagccttccaagtagctgggactctaggtgcacaccaccacacctagataattagagatggggtttcaccgtgttggccaggctggtcttgaactcctgacctcaggtgatctgcccgcctcggcctcccaaagtgctaggattataggcataagccgccacacccagcctctttgctctcattcttgcatttaaactcataccacagtgatcagtaagtaagtggcatctgaatacattataggcacagttcaaccctaagtcacttggtctgcatcagccataggcctccccagccaggatcacagccaacatcacccgtgtacacttggactctgctctgtgtcggccaacactgggccagattccgtgcagtttctccaggctccttcctttcagagccagtcttccaaggcaggtgtgagatgaaaagagcaggcagagcagagcaatggtgttcatcaggaggtggacgtgtcccactggagggatctgctcatgaaacacaatcatggtttcttgggacccatgggaaacactgcccatcttctattagtagaagaattagcttgagggaagaacttgtatcttttctctagttgttattaactagaatgaattttcattcacgattcagacccacttgctaacggggattgtgtagattattcaacaaccattgattgaatgtccacgacgtgtcagacatacaaaacaccaaggaaataatgacgaggctccccacctcccaggagctgaccatcacatgagggggacagatgagtaacacaatgcggaagcgtggtaatgaggatcaggacactatggtgcgtaagtaggatagcatcatagcacacactgccgctgctagcagtcttggcagagctatctcaggcttaaaacttcaaccctaaaattattagtagcccagaaatattgcttatttaggaacacattgctttgacatgcccaaacatatcaagaccatgattatcagggactgatggacgttatcaagggtaggtttttgttcatttgtttaattagcctaaaaattgcctaacactgctcctgctgcatgataggttcacagaaatactagtccctctgcctgttgctttttctggctctgtaggagtgtcctgagtgagaggtaccccaaacagcctcccttccatttatacagagcagatttcactaactaactgaaattcaggaaattctaactttggaaaatggtactgatgcttttagctttgtctactccaagtataacttgttgcaaatattctgataacattaatgatatattaatagctttcattatcttatcttttcctctatgttccagctacaggagtgggcatttatgagtaatttatttttcaaaatgaccctacaccaaggttagagatggtgaagaacttgcccccacaccagagcagacactggacccagggtttgaactcaggccatgtttttattgtaagcactttgctatgtgcttatagagaacaggagaggtagatgtgacatcttccattaggaaacaaacagattattatcatagactatttatacatagtcgacaactagagaaggaaggaggagatagtgctgctatcctcaattgtggcataaataaatatggtaaagaaatcagtgagcagctcaatgattgcaggctggccttgatgaggagggatgacctacatggcctgcatgaaaaccaacctaagagccaaaaggtagaggtgatctcccaggagactcatcccagcagcacagtgggagtgagcatgctgcatttgggaggcaggaaggagccctgtcttcctcactgaggcaaaggtgcgtgcttgtccagaatgggcccagatcagggaggagctggggtgccagggtaaagaatctaagatccgtgtgctaagttctgagtatgactcattgaagagagcagtgacctaatgaaaacattattttattacttataaatacaaaaaagtttagaaggaaccttccttgaggatcatattttatgagtacccaagaattcctgaatccattaggcaatgcaattgccattactcattgactactcaccacgtgtcaggcactttgctaaacccattatatgcatcacctcatttatttctcacaaaacactattgaagatgttattatttttcccattttacagatgagaggcctaagaaaagaacagttttttaaaattgtaaaagtcatacagatagtaggtagacggtctagaatttgaacccaagcaggctggcaccagagcccccatacttaacccttcctccagtgtgcctctaaatagcccatctaaaacagctgtccaacccctgcgcctgagaccaccagcagctagggatgctcgccacccttcccaggcagctctgtttgagtagtcttccctataacataggaaacttatgttcactggccttgatactggctcatttatttttataaaaatgtacaggatgggttgaacagagaagaccagaaacaaacaaacaaaaaaagtcatttaagagattatttctataacccagaagtgagtgaatagaccttgagaagaaacatttttgggaggccttgcaaaggaagaaacgatgatttggaattaagataacatttagaaaaagacagaaatatgcctgtggtcagtctgtagccaggagctaattattaacgctctagaaactatggaggtcttaagctttcacacatgactggaatcgatgatgccgtctgtccactgtcactttttttaatcaattggtaataaaatatggaaaattttgaaaattacaaaattacatatgctattgatcatgagctattaatatgtaaatatgcttagagttcaaagccgtttctttacattttattcaagtatagtgtgtgtctttggtaaaataccagtctgctagccagtgcctctcactcatcagagggcatcctctccaaataaaaacactaacaagaacattcataaaactcatgtcaacagaaagaatttaaactctacttactctcctgtgtccagccatgtctttattagacacagcagggattgatgtcagagggaaatcaaaagtgtcaattgattgcccgcattactgttagtcaaaattaggtagaaacttaattggtaacttaaaagtgaatttaaaatttgaccaatatttaggaaaatacttcccatttcacagaacgggaaattttacatttcacatgtaaaaacatagttgcatgtctatagtttaggtacacaaaacattcattcattctttcatttattctttactcatttaatttattatgaatgcatgcgccaggctttgtcctagattccgggatggggtagttaccaaaaatgtctctgctctcccagaacctgtagccacataaaccacctcccaataggagtcaaaaaattttctgcagaaagattcagttaatggaggtctccattttatacacgctaggtaaatctatgtatcagtttgtaatgaaccacttggtcttctctgctttctaaaatgcacagctgatgtaaagtctaatacagcacttccaaaatatattcctcctcataactgctctgcaagatgaactttttttttccaactctaattttaggttcagagggtacatgtgcaggttacatgcataaattgcatgtcactgaggtttggtgtacaaatgatcccatcacctaggtggtaagcatagtacccaataggtcgtttttcaacccttgcccagaaagagagttccccagttaaacggcaaaggaaaaaacttggtagcacgtgttctcactggaaattgacaatgaatgttagcttagtaaaaatttgaaattcatgtaagatcaataaacctatgttttgaaactagcctttcccaatgtgtttgactgtgggaaacttttttttaagagaaactcttactaataccccgaaagcacatgattaagcactgtacatgatcttgtttctgctagctggatgccaccttcccccacccatgccactctcttctttcaagacccacccaatgcaagcagagtcacagatgggccattctattcagaggctaaattttccagttcatttggtaaatctcccaaaggtttctcatcagacctcagggtgtacttcaagctttcccaaaagtgagctcctagatgaatctagcaattaactgcaaagttttaagacaagacctgtcaactccaagttccaagtttttagtgcagccctaggctttgatctgaaggctgtcacatctcttttccaccccatcctacctattcttcatttacacaggcagagcatggaagtctctggtttttccatccatgataacaatacagcagtagattttggtgcaaagatatgattacggctgcccagagcagtgcagtggtggtaatcagttactaggttgttctatcggatttgtaggaattcagttaaattgcactgcctatattatagacttttaaaatctgcagtctggttaacttgcaggttaccctaataattgagagttactgtatgtgaagatgacaatcctgaccgacatttgaggacatactccttaagctagctctgtatcaggtacaaatacgtagtacgtagggccttagaacaagacagcccacgttgtgttcacctcctgactctgtcacttactatatatgtgaccttgagcaagtgaattaacttatatgtgccccagttttcccattataaatttttagccctctggtctagattggagaataatgtaggaatgatcacctgttggttttatcttcaaatgaattaatatattaacacgtcttataagagtataatgagtttaatacatacaaaatgcttaaaacagtagtacggcacagagtcagtgttcagttagtattattataaattctgttgaactaagcatcctcttgttaccaagtttattcctaatggaaagggtggccaggggttaggtgataggaaactggcatctaggcatgaacagcttaaatttgggcttcactgacacagtgctccagttacctcacttaaagggtccaaatgctacacaaatcgtagtacccaaaagatatgcttctgaaaaaacacagacgcacagacatacccacagatacacacatacaccctacatgaggccctttcgtagactccactgaagaggaaatactcttctggaaactgataatttacctctccctaacctctataatatacaatttctgttttgcagattcacgttttttgtatgctcagttttcttacagtttaacagagatgcataatgcttattctcagaggtccatcccactgctcctagcttcagcacaccaagatacacctgctgacttccctttttctaaggctagcttggaggctggccagctccactttagaatagaccttgatgttagtctccaagggtttgcagcttctagcccggcctattaaaatgtgttctggttataacccaataatttagctgatgaatagtgtatatgacgtgcttgaccgatattttctctttttatctggctgggccactgtgatatgaccacagccacaatgtgggttatgtaccctgaaagactaagcaagccagaattggacattgggtctccgcaacccatggctcctttactatcgaatcagctttcgtgcggcgttccggtctgtgctggagaatggtgtggcggtactcggtattggtttgaactttatgtgaatcaatttatttcgtgtaggaggactccagttcatcactaatcttgagaactaaaatgagtgtagatctggtggaatgcatcagtaaaagcaagagagatgcccaaatgccctggccataggtactatatatggacttaaataaataaattaagaaactcatttcacataggccaccaagcagtcatgagatgttaatgacttttagtcactgccaacctggacaaaattcaagccaatgacctacaggtgaaaggctctatatatcccattaccaatcccctgagccatccagtcgctcctgacaaggtattttatcatacagagtacagtgcagtacaatagtccaaattcctatactgtcagaaaatcttctactatttaaaataaaagagaacatgtaaaagagaggcagaaaccctagtttctcaaatacaagagtcatttcaattaaaaagcattttggaagaaggagacgggcatgtatacacgcatatattgtgttgaaaattttaattctaatatttttcatcatgtttactccactgcatatttgattctgcctctggatattcagtaaactggcatattttggagttccattaaaaaagtcattatttttagtttaaaatttgttaaaaaaaaaaaaaaaaacgattcgttaagcctatggtgctttctttcctagcttgtttttaagtgtcataaataaatgatttaagtgtcccacaagacgaatgtgctttaatcatctaatgcactgatttatcctaagccttaaccttagtcctaaattaagtctgttgcaaaaacataacttcatcaaaaaacacccatcaatcctacatggttttgataagcacattttaaaaacataaacaatcagacagttgtcaatctgggtgaagcccagttccatttaagagttattcaccagcagctatattttatgaccagaccaccaacagaattacagaaaagaattgctggtatttgggcctttgctgagagtttatattgtgaaattgtgggatgtggaggtacagtttataagaatataaaatggaacaaagactagacaaaagatgatcgttattccaaatcagatacattctgtttttgtttttggaaaatattaataatttcacaatgccgtaaatacattaaaattttatgatcccatatttagtcaattgcgtgtcatgcctttgattaattttcatttgttcatggtcctaaaaatctgtcaacgaatctggctgctcagagctcatacatgagtaatgatcacggaaaggtttggtgcaaggagaaatgaagtgaaaatgtaatggaataaacacttgactaaattgggtacttaatacctcataactaagaattcacagaatttggtgaaatcttagctttgacaggtgcccactttaatttcaaattaattcttatgtctttcatttgccaacagtacactttcatagtaaggcaaagaaaaccttcccgtttttccactggcttccttgggttctgtagaattattaccacagagccccttggggttgttgaatgcttccctcaacccccaactggggctttaaaatttttttaaaatagataagagcattcagcaaatagctacattgagaataaactcaaaaattatcaccaaggcccttcctctgccacaatttgtcaaatctgctgataggaaacaaattctattcataaagattttatttggagtgggggtgctcttgtgatttggtagcaattcaattatagttttgtgagatagtgagcccggagagggaatccagactgacaagaaatatgacaggacagttacagagtgtttatgcaattaaactttcactgacaatacctgcagaatgatgaatgcgtgggcggaggtatgtgagcgcaggcaatgccccacaagtattgcccatttttcattattatacaactgttcagatctttcaagaacagactgaagtgaggtggaaaagagagtgctgttctgcagcatgttaaccaaatgccttttttaaaatcccctccctccaatgggtcttgatgtgccaggtgataaaagaacatctattttagaaaaatgtttcgaaaagattaagatttaccctgagcttgacgtatattaattttggataccaaaagaggtttttattattttttctgtctgcaactttatatcacttcccaactgatagaatagtgcataattaaactattgagttattcattttatgcaagcaggtgcaaagggcactataaaagtaggattttactgatggtagattaagaaagaaaggagacacttaaaagccttttgtagagaaccacaaaagcttacagaaaagattaatttggttgggcaaaatctgtattatatgccttggtcttccaaagatatatgaaatcaggaaagttgcaggattgcagagcctctaggagactaagcagagtttttcaacttaattaacaacccttatttggggtatttgtgtgagactatcagtttttggtgagctttggggtttttttaaacaagatttttaaaacaagtgtttaagtagcccaatgtcttaaaaaaaaaaaaaaaaaaaaaaaaaaagccttgagttaatttgcgtagactttatcgtagcaaaatatcagcagtgcccagaataacaactgaacttgtagcaaagtgaattctttcagatcccagagcttggatgattcattgtgtggaaatgagagcaaaaacagttctagcatgtggcacagaaatgcaaagcactgaagtgaaaaaccacatcttccttaatatttatacattgattgaaattaatgagatttactggagtaaaggaattatatccatccttcaactgttcattcactgattttgacctctggtaagctacctgtggtatcaatttgttgttttcgttttgttttgctcaatgatttatgcttctttgttaccattgttattcctttgggggaccctaaaaatcttgaatttttacatggaaataatcaactgttatgaccaatccctgtttttgctttctatagttgggtccagacccaaagtcagaaagctacagttgcatgcctacctagacgactgttttcctggactgagtttgtggttcagtgttgaccttccgcatacccatgtggagatcattacagatcagactcacatctagagactgtgtttacatgatcccgtcaatgtggtaaattcagtgaaataactagtcacttcaatagcaacaaaactcagtcaaccttattgtactaggagttgaccagccatttctatcaaaatgatcaatccagaagtcccatacaaacagtagcgtaaagatcagtttcttgtaattatctcttttgccaaagagctgcactctgacagccaagaaaaaaagcctgagtttgtcagatgtgattcttaatatgcactaaaattgatagttaaaaaatattgttttcacattacttaggtgttaaaattacacagtggtgttcctttattttcaaaaaccaaacctaatcctgttaattcaaagtgaataacaaacaggactaagactttttcccaagttgttacatttattcaacctgcttgtgttttgttcttcatcataattatttccaagtcaaatctgcactgatttccttgcggacctgcgtacctctgactaacttaaagaattgagctgggataattcacacaattcctcaggggtcatgttcactgttttttttcaaggacatttttattacaaagctgatgaaatttgcatattaattcatttctttcagttttttaagattaaatgttgtcaacatgtatcagtgcaaggctctgacagtgctgatgaaatgggtcagtcaagcttgaacatttagagtaatgcagccatctgcaaccccctcgccccttgtggagttccatgctaccattgcaacttgattaaaaaaagttttattcaatgcaagatattaaaacattatctaagaaatgatatgtgttagtctttccatttactcagaaagtgaatttgacaacaaaactgatctaaggagagctgtgctgatttggagttagtgttctgtcaatcttaattaaatgacagccaaaaagccccccaaaaaggtttaagtttagtaaaaggaccttaggaaggaacctgcgtataacatttcctctcctggtgtgatttaatagtcaaaggagctcttcccattggtattctacacaagaagtgataatggggaagtttataaaatgtatagaatgtcaaagatctgctgtaacttatttcttggtgtcttcacaggtcgacctgccctttatttttttacaaagctagtaaacatgaacattaatgggtcagatctaaagctgtcacaaaatggtaccagtgtttacatggagatcttcatttctgtctacattcccaacttgaacattaagttatattgatttatccaatttccttatagtcaaaacaacatctttccatcagatactctgcgacagcaagaccacctaaatgagaaatccctttaagtgtcacatcacctttctacgtgacccctgatggcttttccagatcatttaattctctgtgtctgcttttttggtagaagcctctttgtagcttcatgtacatctcctaccatcatgtatatgatgcccttgatagcttctaaaggccttgcaaagaaaaatattgcctggctgttgagtttaggcagcaaggaatcctaccaccacatcagttctggccatacaactaactgaagtacctccacatcacaaaaggttacttcttgtcctttgaggttctactgcgatgacctcacagaaccacatgacccaactttttgattcctaactctgctttcagatggtcacccttgagggagcttccataataattcacagtattttttaaagtattttctttgaatacaatttatatgtaaagctggtcctatgctaccatatgagagactctgacttttaaggttgttaccctctaccaacacatgtccactgcttaattcctagttgtagcattgttgtataacaacgttagttagaaaagtttgtttcccaaagtgaaaataatacactgtctaatattaagaggacaacagaaaaaggtggtctcagaaatggttttatcttgattttgaattaaactccaaaactcatattggattgaaaaatcaaaatcagacttcacattgtcaagttggaaaatgtcagatatgaaatatttaaactgtggaatgcagtcttcgactttggcttataaaactttaattttgtgagttggtagcactccaatagttcaatatttttaattctacaaatccatgtttattaactttcaaggtttaaacagtatcaccaagtctattgaaactaaattattctgacttgtgagagctacagggtagctataatttgttttctatttctacataagtgacaaagacaaaagaaagaacaaataaaaggaattgattgccacagcaatccctttctatactttcaaaatgacctaaaactttagctgatcattaaagcaaagattcaagcctgcacagctgtaactgtggggtttccctgcataagtcaggtagcacttaatgtaggggtaccctatgtcattaaaaaatgactttcattatcttattgttgagaaattgactgtattcctctcgaagaagaaatattactttcttttcttctctttatttaggaacagttttgaaaacctctaccttgatgtcatgattagagtaccaaagttccttcttaatagcggtaataactattcatcttcctccaattagtactcttgtcttgtaactccccaggttttagtatttttctattcctaatgttatctaacctgtcactattcatttgttaatatatttagcgtttgctcaccacttactatgtgctaagtaaatgaaatcctttaatgagacaatagtggtggcacaaaaagaaccctggactagaaaagtaacccgtattctactcctggttctgtctctgccaactggcttgccttaagaatgtactttaaacactttgagccactttcgtcacccacaaaatgaaacgagtatttattcacatggttattgggccatcgaaagacataataaacacgagagtgcttcatgaaaacatgaagcgtttcatttgaaaagctcagtagagtaacgcattcggtaaatagtgcagcattattctttggggtttgtcttgtgatttttatgttttcataggtggacagcagcctcctggatttttatactctaataccatatccatagcagctgctgttgacttcaacatccaagttagattatccgatgaaattcattcctccacctaactaaatctctatgtaatttagtttgcttccaggaaaggaaagtacatttgctgtaaacccaaagtcctggttgctagtaagaaaattcagtatgttttgtttcttgcttttgtttcgtatataacgtatatgacttcatgatgatttgttcagggaagagaagttgaggagttacccctgcatctagaatctgctgaacatgcgctgcaaaagcattacttacttctgagttgcccaaatcaacttggaataccaagttactgccccaagggctgtttctccacaaatttatgaactaccagttcatgtttcttttctaatgatacattcagtgatgggccttttctgagctatagaagaaagcctggtctttcttctacttcgtgtttataaagccagctactgctgcctgttggcctattctaggtctgaagctcttcaactttagagtgcaggaaaatcttgccaaattaaagattcttgtcaccaaccctggatatccagatgcctggttacatcactgagacttttctgagctatctttggcatctaaataagcctgctacctatgtctatcagacagcaatactgttcaaattcaaggctgaatttgcccccaggcagcttggactcacacagccagagcttacataacagagaagaatatcatccagggggttggcagaacttttgttcttgattaggatgatcacaagttaagctgaaccggttttgaatgatttattctccaaaacagaaaaggcttgccttcatttttcaacatataatttaattatgagggccggggaaaagttgggggcaatgtgtttatggcagtgatacaaataagagttcagtctttactaacatgccagttaaataagcaactaacccattctccaaaaataactagatcagattgaacctttaatcaatcttcttaaatggtgatgggaaactacagtaacctgatacccaagatgactgaagtgtgcctcgaagttgtaacttatctgctgactgtctaaagcttcctaaagaattatacattcatgtatcttatgaattttcttccttttttccacccagtgttttagacttccacattaatcatggcgagtgagattttattaatagattgttaaatgtgctaaagaattgtgtagctagttctttaacctagcataggcagggttattagacattctggtttttctcctcaatgtgtctttctctcaaatgggtccaattataagtgatgaaaagaaatttccattctggaagaattctttatattcttactatttgagaagagtatcttctttcttgtatactttcaatgcatagagacccttgcagctcatgcatccgatggtctgcaaagccctgtgccagagctgggcaggccacagtgaagagctcacatgcagacctgccctcaaggagcaagggttctggtgaggcactgacagtaaatgacaaatcatcactcaaccatcacagggctaggaaagataactacaggtgtcaagagacatgtaaccacaggtaccaagagacatacaacatatgacctccagaattttcagaagataaatattaaatgtttttattctgcttttaggaacacaaaagaaaggtttttttaaaattatgtgagtaaacaatctgtggcttttgccatgaaactgggtggtttccatgttcttttgaaggggaatgtgaagtcttggttatctcatttatcatagcttaacttctttcaagagagagatcacattaaagcttttgcctcgccagccctcagaagatgctcacaggatgctacaggaatatcttacgttgtaaaataatttcactccccaaagaagataaatcacatttttggaacttaaacactttctcatcattccacatccaccttgctctttaggtcattctgaattagtaataccctcccctaaacgttagctttaaaagcccctgacatacttcccttcctcagacaggtttcacaaaggaaactgaaatattccagcagaattccctatttaaaataatcctttgcacaaagaatatttataagaatctccattgtaattttcaattgaattgatctatagttaatcaatagtggagacttggctaaataaaggatgaaggtaaaccatgggccaaaatatcatgctgccatttaaaagaatgctgaggatgtacatgtccagatatggaacccagttttcaagctatccagcagaaaagggaaaggggcagaacacatattggttgctgtcatttatgtaccaagtgaaagcaggtacagccacatgtgctggcatgtggacaagaatctctgcagggacacataggaaacacagaggtggcctgtgagacagaccctaggaaatctcaggtgagagttgggaggaaggcttgttctcgctgtatacccttctgtgctgttttaacgtttcaaaaaaaaacatgtgcatgtgttaactttcattttaacgtttttaattgctagaaaatatcaaacatttaaaagctggaataataaatcattttaaaataaatatcattaattaaaaccaaccaattaagtaaaagggaaataattttcttaattatatttttatatcacggtggatccttttgtgatgaaaacaaccctgctaaattgtaaatttgcgttggcaatagatctgtttttctgaaaccgaagcgcactctctgagtaagttctgggagctcaggaaaaattatttgcacggaatcaccaagcagttagctcctccagccttgaagacagaaagggcgccaggaaagtggctgcattcgtggaagaggagaaaagcgaatcagaatgcagccctgtaacctctggcaacaaatagtactcaatgtgaaatgggcactaatagaacattcaatgctgaaaccctttgcctcggccagagtaattagaactgtaattcagatttgggatttttctccaaggtttcacagcttatgaagtcagcagaacagggttattaaatcatagcccagtaccaagtcaaagacatttttttttaaatgtagaagacagggaaaatgcaagcagcagctgagcagtcctgtgggtgaggcgatgaacccgtacacggcacagctaatgacctgttttaggggcacagctcatatattccaaataacaggggggaaagaattccaaatagcttaacatcattaaacccaaaatgctattggatccttcctctgtggcatcataaaataccctatccaagtggagaagggatatgcttactgtaaatcatggaaagtttatgccaccccagatgcaaacttcatactaacttgttccctctggggaaggttcatgggtttgctttgtttgggggtttggcttgtttttttaaaagcaataatagtctttgtaggatggctgccgtgtcagcatttatcttgaaactcatggatatgagttctgactggagtcacctctctgacaagtgttattgcgactgtgttttatatccctgttcagaatggtttctgatgataatgctctgtctacctcgctgcttcacactaaattatagatgccacgatgacagggcaaactgcatccgagcacagagctcaactccctttgtgtgatgtcagtgcctccaccctcctgtgcctggaattaaaaatggggagcgaaaatatgcaaaacatttgtgcttaaaaataatgttctgtcagttattaaacaagtgatatttcatttaatcagctcaagggattattttaaatgaaaaggcagagaggatgattttattaacacattcctgccctagagtcctacggtaataattctttacctgcctaaattaaaaagttataattcagtctgtctacaggaagaagttctgggtgattggattttattcgttctttgatttttagttgctcacaaatggaggtaaaggctgaaaagcttatcctatagcagtgaggatgttttagctagttaataaatcaccccttctctagatagtgattgcgtccaggacttataaagcaagtgtgcttctgaacacagtattttattgaaatggggttggtctgaccaatccacgtataaatttgaacttccctgcaattcattccaccacacgtttaaacccagtgtggaagatttcgctactatccaaaatatgtttcttaatgttgtttaattgtcaagtacagataaagcaccatgtaggttctggaggaaaaagagatacaaatgaatacaattacattcctgactttagtggagcttataggctagtaggagaagcacgcatgtgaacaaagaatttaagggcgtccgtgaaacaaaggggagaggagaggagaatgaagtagctgatttgtgggttccattacctaccctgtcctagtgcaaggaagcatcagcactctaatacctttcatgaatatggtgctgcacagcctaccaagtattttcaaatacatgctcatgtttgtccatctgagttccataacaaccctgtgaggttaggactgtcttttttatttccattttacaaatgagaaaacttcaaaaacagagaaatgcataactttgcctgatcattgatctcatggtttaaacctgaacttcaaagtctgtccttattaaagcatagattgttaacctgcaggtctgtttggccatcccatattgagaggaacactatatgcaaaactgcgtatggatgtgagtcattgttcttgaaaaagggatttgctcaaattctcagagtggaccctggctccaaaagacagtgggaattactgtttcagtagaatccttcattagtttttagatccttggcttttcattaatgtcactaatttgttttaattttttctagagagtggggaaaatgttataacaattttggtttgcttcatatttagacacagttccactcccagccaccttttgtcttacaatttctacacaggagtatttagagcaactctttaaaggcctgttccttcactcattcattcatttatccatttaacaactttttgagtatttccagtgttcgtactgaatcagtctctgcccatgaggtacaatttgtgattaggtcattggttcatttgtttatttaacccaaattctgtgtgcagagatatctaccaaatgctttggaggctacaaagatgaataagaaatggtatctgccctcagggatcttacaatctagcaagagatggatgtagaaccaactatataggaagcaaaactaaactgagatgctgtggtagaaaaaaagtagattgtcaaactgttcagccttctagagaagatgcaagataaaaactggagaactttctggaaaagtgcctaaaaggagtattttcagttcctttcagaagtaactctctagagaggctgtcctctgttccatgttaattgtgatgctctttcaaattctctttaaacatgcaaatggtattggtcatccagttattgctctcacccagtatcaatagttatccctgtcccttggacagaattatcttggctatgtaagaagggaattcagccaaaaatgcaattggtgggagagtggctttctattgcatttggaacatactcctatcattttcagtcattttcagtgcttttgatggatctctccagttggaaagaactcaaaaccaatttcagtgcagatgcaaataatcctaacaaattattctataaatataccacaaatagcaatactttgtgaggttaatagctcttacttatcaaataagggaactgaaaaacagaagttgggtccatgtgaggaaagtggattgactctgaatccagagacctgtttcatggtcgacatgacttttctatgtataacctagaagaacactaacattcaatggattgactcataattacaggggttatctttttaagagtaacttatcatttgtctggctcctgttctagatatgtatgtggaacctgaaggggagagggtgggagggcaagaagatagagacctcatctaacccacattagacaaggagtgagaatagaatcagctccctgaatggcaaacttgtgttacaaccactcttgtcagtaaggattgagggagctgggggtgcgagttgatgtacattctcttctttgaaaataagccctaggttgatcattctgggtgtgaaatatccacctgacaatttccacttaagctagaagatataagccacattatatggctttatgtatatatatcaaactttccaattgaattaggacttttagtttaatacagcagataatgaaatgcaaactccatcctgagtcaatatatttcctttggaaatcgcattagttggaggtggggtgggggaagaggattggggcagaagaattcctgtactgtttaatgtagaacttgcaaaattatagtcaaaagatacatgttctaatgaatagcgttatgatattaaattacccttggctgggagcagtggcttattcccatgatccaatcacttttggagggtgaggtgggattgccagaggccaggagtttaagactagcctgtgccacacagtgagaccccccatttctacaaaaaaaaaattttgaaaacatttttcaggcttagtggcatgtacctatagtcccagacacttgagaggctgaggcagaaggattgcctaagcctggaaagttgaggctacagtgagccatgatcatactgctgcacttcagcttgggcgacagagcaagaccctgtctcttaaataaatcattgactcattcatttattcatttattctcataagtcttaatttttccaggatcaggggacttgctttctaggttaagaaaattctggttttaaattttaatgttatcatttataatggttaaaatctacaactatcatgaatgggaggcaataatacatgatgataaaattaacaacaacaataataatagcaacaaatagggagaacttcctatgtgccaggccatatacatgtattatctggtttaattcttaccaaatcctttgaggtaggaactattattaaccccattttacaggtgagtaaaaaatctcaaaaaggctaaataactcatctcaagatcacacaccagtaagcaagagggccaggatttcaacccagtagcctgaccccagagcccatgttctccaccactctgtaccaagagcagagactctaaagtcaggcacacttgactttgaatctcgtctcagagctgggaaaccttggacaagttattttactttctaagcctcaatatctttatctgtaaaatgaatatacagtaataagacccacttcaaaggactatgtgaggatgaaagaaaacccgtagaaaagcacaaagtaaaacactatattattgcccattaccttgcacataaatacgcagtgaaatctagagaatttttaggaataaagaatgaagtcatgtgataacaaattagatggctaatatgagttatgaaagtgtgtgtacatataaattataatgtgtgtgtacatataatttttatctctgcagattacttttttaagttcttgtaacaacagaattgtagctaaaaattaattgttaagtgagaatttaaaaatttaacatgggattaaccaagtacatcactctcagaatttagaaattggaggtacagctatggttgtagttaagacattattttacttccttattgcattacaattgattgtgtagaaaaatctcaaatataaaaataaaaagtagttcatgcataaagcatgatgccctgaagcatattagatctgtttatctctttgtttaaaatgaatgctacctggtatagtttacataacatggcagggatcagcttgataaagtgtttatatcacctggggaacacactggctcattttctcaacacctttccacatgactagcttgccagcaagtataatagcaaacaaagttttaataggtcaagagcagagtaactgctcacattaacaagagggagagagcggcttgacgtgcaccaaggctaataactgacattttcagcatgcatttttgaatgctgcttaatggagagtttagaagaaaaggcttttataaaagcctgacataacttctaagctttgggtggaaagaagaggaaaaaatagggtggcattgctatgcacccacacttgaaaatatgggtgcagtttcaggcaggtcgctcataaaccatttctccatcacttgtctgccttagcaactcacaattaactccattattaagcttaaggatttattgcatctcttccacttttttaaagctgtccaataggggaagcgccctcatttttatttgtttgttgtctaagtgaagctgctacttagagactgtttctgtcatatcacaccagttttactgaaaggtacaacaatacagataaacatgatctgttttagaacctttctttcacctaccaggagggaaaagggggttgtacatcctctctctccttccttccagctttgtcttcctagggcagtgtgattatctgtgaggttagtagcatctacacagttagttcattggctcccttttccccctagaagcatgcacaataatacatttcagtaaagttttgggagtgttgaaatgaagatatgttgctaaccctggctttggcagcccataaatgacaaaggtttgttcaacactgaatttatcctttccgcattaccaagagggaggcgaaatcggctactgtatttaaatggaagaatgaaaaagactttcttttgttgcaaaacccgtgtcttttgcggacattctagagttgaagcctctaataatacagggcgtggagaagctatgtagaaaaaaagaattggaagttcgtgtggaatgttccttagatacaagccactgtggcaaataggaaactttgtcaatatgtatccaggctcctgtgggatacagatcagtaactgaatcataggtaaatagatagattagatatggcagtggtgggaaatacgtactgaaaaacaaatccacaagaacaattttacagggcttgtcttctattttcataaggaaactaagccaaatcatctgacaagggcggaaatcaaatcatctgtcaagttcctctacctttcatttatcacacagtttaataccataatgaaaaatagcaaatgaaaaatgaagtgaatgaccaacgaaaaatgcattctctaaggatacagtgatgtgttattagcctaaatcctccacccctgtacacatgtaactgctaggggaggccctgtggccacacaacccttttcattcaagtatgacaaatcccgggatgacattagcaccatggttgggagagccatcagtacataaaagcttccctctccttttattcctctcagcctcctacatttctttatcccttctttacatcaaaatatgagctagtagggggtttctgtatgtaagcagaggcccagaaattccatacacagcaaagaaatcaagtggtggagagggaggatggagctaccattcactgggtgttcaccacatgccaaagatttatctttagaatatccatgtaagggattatgaatcccattttcacagcagaggaaactgaaaatcagagcaattaaagtcattcatccaaactctagaaatggtggagccacagtttggaccgaggcctagctgacaccaaacaccatgccttcccccatagatctggctgtttctcatgatccaggaagatagaaacgtctgacaaaatggacactggggcacgtggataggagtaaaatgaataaataggaactttttactggacagccttaaatataaaatctaaacaataatggctaacatgtgccaagcattttcaaagtattatattactttgaaactatgtgtgccaagcatgaacttattcaatcctcccaataatcctaggagcgcagattattgttcaccccatttccagatgatggacttgagggctcagagacgtcaataagttagcccaaagttgcacagctaggaagcagccctgagcagctgattcagagcctcccctggctccgtctcacgtcttttcagcctaacctcaaagaaggaaacaagaacttgcctgggacaaaaacgctccaatggcaccctcttggttcatcataagaaaaggctatctttaagaaaatcacttcaggaacagcaatgaaatagctccatttaaataatacacccattaaaataaaatattatgtgtcctctatcttcctgtctaaacagtgtaagcttgggggagagataacatttattttacacacttggtaaagtctagcagattgtgggtactcacatcagtctcctactcctaagccaagatgattaataaggcagaatatatttatttctaaggagcagaggagttgattctgatttagacagtatgtgctgttgagctgcaaaacaaaattgacctcagcataattaagttggacactggtggagtgaggacttgaacacaaatagttctatttcgacaagtagaattcaagagcagctggtttctttttcttctttttttttttcaaaaggagaatgatgattatttaatatttgttgagtgccaacagtgtactcagcgctgtgcaagacccaggaactggatgttggaaactgcctgaagggaactttagcaaattaaaatccatagaatcagcatgaaggcagctgaggaatacctgattagaggaagaatctcttcgcctgtcccagaacaacaacaacaaaaaaggaagtgataggcgagaaataaaaacctgtatggttcaaatcgcaggaatgcagtcgggtggaaaagtatgctttaaaagagagaattcctgcccaagtggagctaatagaagggaacataaacttcagcaggcaagatggagggcaggagaaggaagaataaattcaaagaacaaagacatcaaggcaaattatcagcctttcctctagcccttccagagaaagaggcctggaggaaaggcagccccataggtcagggtgtcgggagaagctggagggatctgcagagcacagctaaattatcgctttgcctgcatgcgtggcacacagcacagtgagtcaatatctgaaccggggggtggtgagggaaggtatgcttttggtggtgaatgtgaagttgtgtcctagatgtgggaacgtggaagaaagccacagtagaaattacattttattacctcaccaggggctgatggcccttacttggcaagtcatcgagcagccacaaaaaaaaacacaaaaaagcagcagcagcagcagcagcagctggccaccaccagcacctcaccgtgttcatggctgcagcagctgccctaacgtaggcaggtttcgcagcagccacccagccctgggacagtgagcccagaacagacctctcaatgagcaaggcggtgtcctcggaagaaaccgcacagtgatagaataatagcaaattggagaagacttaggtgctttagaatcctttgaagaagtccccaaaaccatggataaaagggagtactggtgggtgtgatacattttgactttcaaaggactttaggtaagaaagaaagaaaaataataataataatccttgcaagaggctattgagccaaattggtaaccatggggcaagtgttaaaattatgttacatcttaaaaactagttaagagatggaaggcaatgagtaggaataaaaggccatttctttctgtagaaagaggttaattgtggggagcccaggggagaaaaccaatacaggctttattcagagtcttaacgacctggaagaggaagatgaaaagcaagatggcaaaacttattgatgaaaaagaattatttaaaagtatttgagtcatggaagagtcagagagtctagaaaacacagacacatggaggtggggggagcaggacgggaaaattaaaaataacccagcaagtaaaaattcagtcgaagcaggcaaagggcaatgcatctctgaaaggcagaggagcccaggtcattccagggctcagcatatgggcactgctgtcctgagtgtgtgtgggtctttggtaggattgactgagactagggtttggtcatgcagaggctagcttttctgcctctactagacctgagcacctcagtatttcattttctccatttgcaaagtaaggacaagaaaattggcttcatttgtaggtttactgagagattggatctattactgattgaaaatagatcggaaagcccaagtgagatggtgttacccccatatatttattgattgaatgagtggacagttctccacaacacccaagtggcttttgtattccactcttctgcctgcctgcggcacataactgaagctcttttctattcacaaaaataactgctttatttctacagatggcaccaaagcataccctgcgcgcgtaagtcagtcattgtcccctggagaaaggtggttgttcatgaataggaggttaatcagcttcttataaattttagctatttcaaatttaaaggaaaaaccgtcccaccccgaaggctgatgaataatatcacaggatgccaggagaggcagaagtgaattcatactctctgctacttcccgcccccattctcccatccctggccatctggagaacagagcctaccctctgaataaataactcgggagggcaagagtttaggttgacttcatggctgaattggatgatgtcagagagtaacagcacaaggaaagtttggggagttgatattatgagtaacatttgctaagttctttccagtgtgagaagtgctttcacatccattattgagtttgattcccacaagggccaaccctgtgtgggagtccacatatcaccattttatagatgagaacactgaagcccgcaaaggtttaccgcctgctaatgaacagccaagcccaacttcaccatggctgttctaattacaaacccaatcctttctgcttcaccaaataagaggaggaagaaaataagcctgcccttcctcaggacttaaatatcccccatgcatgtaggatggttgatatgtatcatgctgggatttttacagaccactcccttaccctcccacacactgtgcacacagccccacgcccagcctggagagcactgaaggtaaaccgaagtggcgacttcaacactcacacttgtgttagcaagagcaaaccaccagagagatgtgtttacacattcaacattacccttagggagtctgtggagattgtgatttctatttgcactcatcttatgttagtgattttcatattacattagcaaatttaatctctgctcatgtgataggaagttactaacacaatgcgacttgatgtaacaactttcagactttggtggcaaaggcaaaacttgtgagcagaacgccaattccaatctctaattaaaaaatagatcagaacacagagacatccgcagttcccatattttagatctagaatagagccaaagttgagggtaaagagtttgtatctgagaaatttgtgaatggggacaaatagcttgaggaatcactgctaggcttgagatcttatctttcttgtcctgagttgataaagggtcatttgtgaaccacatagcttcttatccaccagactcactggaacctcagcaaagtgtgggtgttgaaatcaccaaaataatgatcaaatctcactctattaagccgaggccgcattcttctcctacaagcccttacccttttggctggaaaacgaatggctcagtctcatcaggcgtgccccgctcctgactgctctctgctgtcagtgccgacaaggggagacacatccagacagtgggtccccggagaaaggaaaaaggagtgccccaagtgaaggactggccccaggacattgtgctataggctgagtgtccctaggacattctgagaactaactctagtgctaacttttatttattctaggcttccataatgcagccacagaaattgagactgctttagaatcatggtaataagctagagaaatttgaacatatcttacaaacaaacctttatttccgttatgtacatgagaagtatgtaatttagattaccaggtagccagatatgctgagatccagaaattcatacaaagtgccaaggttctcagatcataacccagtcttatgccaaacacagaacttctcgaatatttgctttaaaagttctgctgggagcaagcgcaggtttccaactctctcaccttcatgactgaagcccgtctactattagtatttttctttttaccagacgaggatttgttgctgtaatacatacgtgcatgcactgtataataaaactttcctgattatcttataactgcacattaaaaatttactaagataaaattaatgtgattttaataacattgttttaatatacagaatgtcaggtgacagggaaaaaaatctattttgaattcagcatgcagtatgcctctttcagcaccttcgtaacaataactgaactggcggacgagtgttgtctgttaagatttctgatacgcacgtcccaggggagatggctgaagttggggccttttaaaatgcgaccggacaatgcttttgagactataacatagagaacttccctgggtgacagagagaccgggccaaataaacgtagatagaatgttgtttcctgtacgcttttctgtaagattcagccagagtacataacttcaaagaatcttttgatggagaaaaatgttttcattcgcctgttttatgatagtgctgcaggatacttacagttgatttactataatgacaggacctagatatggtcccaaaggaaaagaaatcctacttttcttctgccacctacccatcacatttattattcccagctagggggtgtggacaggcaagtgtcaggttaaagggaaagatggtcagaacatggtgagcagcgatcattagattcctaccagggtcactcgcacaaggcctgtgactcagggcagtaacgttcccatagtcaggtgcctgctcactccaaacccccaagaaagagagcagacctcccagttctgcacggctgcttaggggatttgaggggccagggagaagtaacagtctggcttctaccccgttgggcagagactcagctaaaggaagtgccaggacactgtgctgacccacttcgagcccttcctctccgtttgttctcaggcagaagagatacaaaagcatcactatggcatggtgaaaagttggagaagcattctgcaaattgacatgcaaataagcactccaagtactccactttgttctaaaaattcccatcactgggagctgtaaaaaaacaccaatcagaagaggggcagtgatgggaaggacctggtggttttgcaaccagagtctcccccttggagggattgcttctgtaccacgttctagcctcagctggcacaggtgaagcaaaacaccccccaccaaatgaccaagaagccaacagatttagatgtaactgatctgtattctataataacacacacgcattcaagtggcatctgctatgaatgatattagctgtccacacaagcaaataagatgcaaacaggcttcataccctgggttcatgaagagaagccaactatatcaaatgagacaaaggcaactgtctccacaaagccagttcctgcaccttgagcaaatgcacaacttttttagtgttaaggacattcaagttcgagacaaaaacaaatccctgccttaatcacgtaatcactgttttttaaatcaccactgcctctgataacctagatgtcaagaccccaccaacagttcctatggcacactatgtacaatgctaaatgaagtcagatatcaccaggaaagtgaagtctctgacttgttaatgggctacaccaggctgcagaatgtctctgtggcttaattcatgatacacactagaacctgagaaacccagttcattcttacagtgggcagtgcaggccatgggtaaacaaggtatagcacatgggacgggaaggagaggtgttaaaggaaatgctccgaaagctaggctctttactgggaaattagaggattcattctaattacaaacctgccatttataatgtgtctccctcctctcatcaacaggaggcactttctctatgctgtgtggggtcattttgccatattcatctcttactcctcccaattatcccagagtcaacccttctgaaaatgatcatcccttcttctctcttactgaaggtgttctttgtcaggaaagccaagccacacactcaaagtcctgagttttgttccattttatcatctactatctgccaacagagattagttcaattctgttatcaactcaattgatttacaaggtctcatatagtaagtcgagagcaagtacaaccccaaggctggttaattcaatggtccaacgtgattacaaaaaaacaggttccttccatcgtgctactcttgccccctcaacatatgagtctcatcctcagccttatcccttagttaagttggtagcaataaccatagcctcacagccatgtccagatgaagacaaggcatgtttgcttttttgagggaggagggggtctccttttaagtttaagcaaaacttctcccagaagccccatctggcagacttccctaacttctcatggtagaattgcatcagtgcctatgcagtcacctttggaggcatgcttgatgcttgacatctctcttcctctgacatccacattcagtccacaagcatgtgctgtcagctgttgcttcgagatacatcttgaatctgacctcatctcactattgtcaccaccaccatctcaccctgcactgcggcagcagcctccttgattgtgctcccaccctctgtcctttagtctcacacaagagccagatcatgcctcagctctactgaaaactcccatggggcctttgtcatcatatttagagtaaaatccaaagttcttcagggtcatacctgtgatatgtccatagaacacatctcagcatctctctgcttttatcgccatcacttttcctcccaaactctgctgtgtccacattggcctccttgctattcctcaaacacatgatgttcctacctctggactcttgtacaggctgtttcttcttcctggaacactatctcaccggatatccaaaagggtcacgacattccttccttcaagtctgtaatcagatgcccccttctcagtgaggtcttctctggccacgttatttaaaattacaactctcacctgcacattgtgcacatgtaccctaaacttaaagtataataataataaaattttttaaaaagactaaaaaacaaaaattacaactctctccctcagcatttcatatttaatcctctgtcttatttgtccccacagcatttcataccatctagcacactagatcttttttctaaatcttctaatggaatgtaagctctattagggagacattttttttctttctcctcccacccgtcactctcctactgtaacttcaaaacctagaacggtgactggaaccagtagaacttcattaaatacttgttaactgaataaattctaacaccagctgtggacaactggaccccatgatggcttacaccaattacgatccatacttgggggtgaacttgctttccctgaagatcgtagctgggcacaggaagatggatacttgggaggagataaatgcctgggggaaaattgagtctttcttaggaaaataagaaaggaagactttgggtaagaagtcaacagtactaactatattttctttaatttatttccctttttaaaagcaagagagataattatcaaatttatcctggagtcatgaaaaataccttacgtcactgattctatttttttcacattttaacatctctgactttggagtgcatcttacaatcactgtcatccaatgatcccataactggcagtgatgttttctttcttggtgcttcacaaaaggatggggcattcttaaaatggatggggtcttagattcaatgacatctcacttctgatgtacaaagtgatgctacagaaaaaagaaaatcaccatcattgtccatagacatgtaaagctggcagttatgacataagccagtcttgacatctctcatgattcccaggaaaactagacattctctttttctcttgccttcatattgagcagctttgatttaagataatgtctgagcagagaagctttgttcagcagtgtcatttgacccagattgtatgtttttatagcttgagccaattagttaaagtgactttgactataatagggacctgtgactttcctcagtattattgcattagtcaccctggaacagtttctggcttgtgtttgtaagctggctctgattgtgcctttctcattctgatatttatatgatttgttgctgtcctataaaataatgacctttgagtccttgaaagtaaaccctctctgattctgtttatttcaataagtccttggcacttgatggcatagtgtgaatcacctttactgtcctgattgctaattgaagtgggttgtttttcagtattttaaatctatattaattaaatgagcattgggctgggagtaaggagactccttagagttgtactcccaactctgttcctggggaacaggataaacctgggaggtcgcttactctcccctgctcttgcctgtacatggggagattgttctagatcagctagctctatacgtctgtgttggaatgggctaatggtgccagtcacagtgtatgcttaatttgggctacgattccagcctccatcacaagtctgggcctcagtaaatgtactaatttatctacaaaataaagtttaataaacactgatatggtttgactgtgtccccacccaaatctcatcttaactgtagctcccataatccccacgtgtcattcgagggacccagtgggaggtaactgaatcatgggagtgggtttttcctgcgctgttttctcatggtagttgagtaagtctcacaagatttgatggttttataaagagcagttccactgtgcatgttcttttgccttctgtcatgtaagtcatgcctttgctcctccctcgccttccaccatgattgtgaggcctcctcatccatgtggaactgttagtccattaaacctctttttctttataaattacccagtcttgggtgtgtccttacacagcagtgtgagaacagactaatacaaacactgaccatgaactccttgggggcaagaccactatcccattggtctttgtaacctgtctccacacagatactactggttagagacagtatccatacaattcacttctgtatctcaactgcccagcagagtgtaagtgcttcatacatatctgctgaatgatcaataattggaatatggtactccagctactgtttcgtcttagccgtcatggaaaccacagcttttcattctctccaccctttgtatcatgattcttccctatcttgtttttcttgtttttccttctctatgtctacttttgcttttattttcttttcatctgttttttgtctcattagtatgtcatgtttcattagtatgtgttctaatcccttttttgtggtaaaatatacatgacataaaagttatcattttgccatttttaaacatacatttcagtggcattaagtacattcacattgttgtgcaaccaccacccctgtctctagaactttttcatcatcctaaaccgaaaccctgtacccattaaacagtaacttcccatttttcccgctggaaatccttggtaatctttattctactttcttcccctatgagtttgcctgttctagatatgtcatataagcgaattctcatccttttttgtgttttggagtattttcctggtcgttgtgccccttcttttagtctgcatgtcctttttgttgctgttgtttctgagcgccgcccccacccgacgatggctcattttctctgtcctcctatgcaccctcagctgccatcaactgtgtagcatttcctttacatctctcatttcttatatccatatataatctttacatttttaattcaatcttttgaaaagtgttgtgtttcatttaaatgtgttataaaatgtttaaggaaagaaatatgactctaaaatgttttgaaagcaggtttctgtaaagggctagctcctaaaatgacagcactcaaagaaggcactgagtagagagggaatgggagttgatgttgttagaaggggttttgccagagaaaccatttcctgcttgaaaaccactgtacgattgacataaacttatgaattatgtaagtttgttgaataacctaagcattcttgggctttttccatctgatcatggccaaaaaaaaaaaaaaaaaaaatcgcaaggagaggaaaaccagtttcctcagggacaaaaggtaggaaggagtcctagagtttagtgacataggcacaatgattccttctttctgagaaggggcaagttaagcactctaattattgatgttcaataacaacttctccctgaaatcctaactgttcagagcagggtgaaagtgaatatttcagggaagttctggataatgcaagcaacaaccccgtaaacacacaaacctaagtacatagagatagatattattatagaataataaatactcatttcataaaatctggaaaataaagtaaaaattaaaatcaccccaaattcctgccatctttttgcttgcattctcatatatttctttctatgcccaaggaaggaccgtgaaatatgttgcaggagagaccctgacagaaagctaaagatttctaagtgaattacaatgaccacatctagattccgtttaggccatgctatataagcaacagtgggtgttttaaagtacatggtcatagacaacagatcctctttaaaatagggaaaataaaggtgcttatctcaaagagtgctgcgacaactaaattaaatgtatatgtaaatcacctggcattaatcctaatccccctctacctcaaagctggtatacacaaaataaaatggttattgagaaagtctagccagtcacccagctttgaggtttaaaattataatggttgcaatttttggaatacctgcttttgtaatgggttttttttttttaagtgagtacccaatacatgttgattcatgcttttccagttttgcaggcctggggaaaacacaggtctttggcacacgcaacgccaaaccagcagctgctgacttgcaaactcaagctacgatgtggttataagaatagcgttcctgttcttttcattcttcttcttccccttatttccttaatgtgcctgggttcttgttttgtctattttgttgtcactttgtctgtgtaatttttatgtatttttctcatcccttaatcctttgtctttatcttgtccgtcttctctagtttctttcttgctaccctacatctttctttttcatcatttttattccttgcctaattctccttttttgcatttacattttctcatgttcacatttattctgtaccattttctagtaaaaccagtgactgtaaacttttcttactatcttatagtcaggttcgtgacacctatccatttctgaaatttatcagcctagaaatctgttatccaaaatcatgttgatgatagcataaactgaagtattagctcacacctgaatttcaagaacaaggtagtaacgtgtgtatacatagattatttttccagtattaatcagattcacatttgatatggtatcacagtgccaggtacctcagaagcgctcaacaaatgtttcctggtcaaatttaacttacatttatcaaactttacctccacgtggatttatttgattgtacaacctcccgaagttaggcaagtcacataatattacgcccttcgtagggaaaagggaatggttgttgaggagatgcataactcacacaaggctgtaaagctgcggccaggtacggtggctcacacctgtaatgacagcactttgggaagccaaggcaggaggatcaattgagcccaggagttcaagaccagccctgggtaacgtagcaagaccccatctctacaaaaaatacaaaaatctagccaggtgtggtggtgtgcatctgtagtccaagctacttgggaggctgaggttggaggattgcttgatcccaggaggtcaaggctgcagtgagccgtgttcacaccactacactacaaccttggtgacagagcgagactgtagagctatccccagttgctaagcctggcctacgacacaaacttcccaattccgtggcatatgtccaactcccatggacactgctgctctccatatctgtggtcatcatcctgtccagtggtacccctgttgttattccaggatgggatttgctgctctgggacccagcagattatcgagcattgcaattctttcctgttccttgatccacccagtaagcctaaaaacagatgtcagaaatagctgtggagatattagcaataccaactacaaccatgaaagcttacatttacttggtgtttatcacgtgccaagctaagtgatttacatggattagttcatatattccactgtaaatgtttactcaaagcaaatacattagagctttctaaatacaatatattttctaaatacatatgctatatatgccttaccaaacagtgccaaaactgtctaacagagaaaatatatccacacatttaaagagaaaagaagcggagtcttaaggagattaaaacaaaatggaagttgaaccaacaaacctggttccaagccctttccttctcttcaacgagtcaccagcctgtaccatttgcctttctgatggactagtctcaaactcacactgagctagtgacattagggaagtgaaccgtcatatggtaaagattgtcttgctctttgtcctcaatgctaaaggtcttctttccatagaaaggcactctttcttctcaaggtatttgcaaaacctcctcgtaagacccctccttgttgcctgtgttaattgtcggggcatcattggcagataataacagaatttgggagttttataataagaaaataaagagatttcatgtctaaaaaaaagaaaagctagtgtagaaattacattaagaggaacaaatctcattgccaaatataagttccaaagaagatagtcattacaataataatattgttattaccaataaaagagaaaaaaagcttagttgtaagttcatcgaaaactttcccttttgtgctgagtgattcttctctagagcctcccaggagtacaaggctataattttaattatatcttggcattctcataaagcaaacagcctgctcaggtagtatttattacctgttaggaagaatacttatgaatatgcttcacagattccaactgcggtgatcagcaatgggccttttcaaggacagaggggtgagttggaacacacataagagaaaagttgctcattaagggaaggtttgttatccaggaacgtataattaaggtgacggtcccagcttctgtgacagccaacacttgggtagttgtttgattgctacgtgggtcagggatcagctcctgctacaagatgtagccacattagtgtgttagtgaacaggttagaaagtaaattacagctgcctttctcaagcacattactgtcagtcttcattgtattgtttttactgtacatcagcaggactgtggcttctgaagactttgtgtgacaggttaggcattttatcctttgagtaaacagtaatcatggtgtgaagaaagtggggcattggagaatttttcctattctttgagaattccactcttcctttttagtttgctccaagggctcattggggatacatatattaagccctttaaatagttcataataaatctttgtctcaggctgattctgacagttttttaaagagtcttttaagagagaatcctcaatcatttgttaatccatggggtgatcttcagacttcaggaaaaaaaataacagcctgggctcttgggtagtgaaaatacaatgtagggaagaaaatatataaatatggaaaatcctgcgattacatgttctgcatgtatctaaatgcttctttcttccccaacaagccaaaaatgaagtagaaaataattgtcaaaatagcaggaatttctattgttatttttatatttttgaacttacatgcgtctcctaaaatgttagacttcaaatcatataagagagaatactcttttttaaagtaagtgaattcttttggtggaaagataatttcttttcttcctttctttcacctttaagaccacctctgtcttcccctaaattacttacatacacactgctatcttacctggtcggggagaggtattctgttagagaaaaggttgtagatattggttgttggcgtcaacaacaaaaaaactttgaagggcaagacatagctttcagaataagggcctttttaggttgggtttacatattttactttcagctttagatatgggctagttggtcaattatattagatgttcataatttaaagactatgacttgtgattttagcatgcgtaattttaacaccccaaaaaaatcacataaaacacttaccagaagagactaaaagcaatattgtctcccatgcagacagttaacattagtagtaatcataatacctgtgtattatttgcacaatgaatcgaaaatattttaaagggaagaaaagtgtgctctatgtcaagtattttatgtgtaaatcattgactatttcaagaaaatttatttaggtttcattttgcttgtaactgaaacgattaagaaggaaactaaagaatgcaggtcatagatttgagtaaaacatgaggataagcactacgtatatgatctgaacctttacgtcatttccaaaatgcagcttctcaagctattgaaaaatacggagaactttactaatgacatgcaaatggaatttgttagggataaatgcaataataaaatggagaaatgggcaaaggacagcctactgatactgatggattcattctcacgtcaggtcgaataattgaagaccccagaacaagggcaaccataaatacctggagtccctgctgttgagaggattaaccacaaaacaattatgacaaatgcagtgggagcattcagctcccaggcaacaggaatgtgtcatgccagttttaaaaatacttatttggcattatagaatataccatttagacccagaagccatccaacataacatcgaagtgttcatggtaaaaacatcaagtatgtcattggaaagctatatttgaagagatcacttcgtttcatgaagcaagaaaaagggaaataattaatatcaacaaatttgttttgcccatggtttgagaaaacgctgcttcaaccccattttccccatcaccatcagcaatatcctttaccttttttaacttaaggaaagggggggtaattctagggcaagaataactgcaagctatataaatggatttttttaatgactgcttttttatcccctccacttgggaagattattcataaccttgaagaaaatatacaaatgacctaatgtcgagttcagatatggaaatgatgcctacacatatagtagctgaccaaggttataatgatgaagccttgttttaaggcagagctacttcttgcaaaagattagatgactttgtttaggtattaagatggagcagtggtcattgaaacttattaggatcatgagagaaaggaaaattagcttaattaaagatgtcaaaaatagagattcattagcaaaataacagatatagataattattgggttatctctcatttctggcttctctaaattattacaaagtataaataatgttactaagaatattctccaataaataaccctcaattctttattgatgatggatttaatatggtacttctaactaaaaacatttgaaaaataaccatttcaagatgtgctggaattgagccataataaaaccaacaaatcctagctgcccagtcaaatttctcctatgtgaaaaaaattaattaacagaagatactgattcaggagatattgtggagacctgccaacctgagactccttctatctccagaatatacacattcacacgggaaaattaaaattggccattgtgtcagaccccatacctaagatggcaaatttgaaaaagccacatcatcacaccagattttacttgaattctcaataattgcttagttctgtagtaccttccagtgacaaagctccagtcactcagcattcactccattaaagaaatgtatcttgggccaatcttctaaactcttccatttgtcatccctgttaagcataagactgcactcatgcaaaacccttcctctgtgtcacattaaatctttattcttctaggaaaagggctgccggatttaccaaatataggattccccattcaatttggaatttatatgcaatatttggatcatactaaaaaaatcatttgttgtttacctgaaattcaaatgtaatggggcatcctgtattttattcagcaaggttaattgggagtaaactctccttagccactaacttttctacaagcctcacgtctgcctcttcaccctcactgagacctttctttcttggaagccactactctctaaccctctccagtgcaactgtccagttcggagtcctatgtccctgaatgtccctgtatgaaggagaagtggtcaccatgcactgcttctgctgccacttccacaccatttccctaggatctttgcttcaatacttcctctcaaaaaaaaaaaaaagaaaagaaaagaaaaaagaaaagcattctttctctgttcttaatgccattgtctatcaacactcacatcactccctgaacttccttcaagatgtcagctcatgctccacagccttcctgtgtacccctcagctcaaggaggcaaacggatgtcagaatgagagtttccatgaagggtaaccattcaacacaaagttccttgactgccaaaacttaaaaatatatatatccatttttttaccttatctttagcacgcgtagcacgatcaaaccttgggctttaaccaggcttcattttcaaaatctcaaatacctgttaaaaaatttgagcaaaagtcacttgggaaaaaaatgtatagactactcaatataaaattttaagacatatgcatttatgtatatcataaacaaaagtaaaaggcaaaaaaatgggatgtatttgcaagaaatatgtcagagttaatatccttaatatatatgtagttcattcagattgatcaggaaaacactaaaaacccaattagaaaatagagaacataaatatgtgattcatttaaaaattcaactggccagtaaatatgtattcaaacataatccatcctcaatagaaataaaaatgccaattgccaggtgcagcagctcatgtctgtaatcctagcactttgggagaccaaggcaggtggatcccttgagcccaggagttcaagaccagcttgggcaacatggtgaaaccctgtttcctcaaaaaacacaaaaagtagccaggcgtggtggcgcccacctgtagtcccagctactcaggaggctgaagcagaggatcacctgaaccttggaggtcgaggctacagctagctgtgattgtaccactgcactcttgcctgagtgacagagtgagacaccaatctcaaaaacaacaaaaaatgcatattaaaaacatgtgagatgtttttacacatttcttatcacagagaaccccgtaaatatcgtatctgttatcttctggtaatttaatgttttctctcaaaaaaaaaaaacaaatctttaaaggtggcaataatatgaacaccattaaatattactgatagacatgcaaactggtacagtgcaacttttctggaaatcaatttgtctgtgtgtattaagagcttttttaaaagctcagccccagtcatactcattctagaaattcatcctaagagataagaaagttgaaagattaatttcaaagaaattcattactatgcaatgaaatattgcacagccactaaaaaataatgtgtttgaaagtgatgtaataatacggacaaatacagatactgtaatgttctttaaaaatttgtttaaaaaaactgatttgcagccaaggcccctagaaccccaacatccatttattcccctaacaatgtctaataaaagtatggttattacctaatgtaaatgacgagttaatgggtgcagcataccaacatagcacatgtatacttatgtaacaaacctgcacgttgggcacatataccctagaacttgaagtataataaaaaataaataaataaatataaaaaataaaagtatggttattaccacatagtaagctatgactttttaacattaaaagattaggcagacacaggttttatcccaattttgaaataaatttatcaataaatggtaaataagattgcgagaagacacattggggttactagtgactatagctgagtgataacattatggggatttttttaaattttcctatttatacttcatgttttcaaaattttctctggacatatctatttatataaacttttttaaagcagtaaacaatattctcagaattcaccctctgaacaaagcccctactgcctacctctctcatgtcaccatactcctgtcctgccatcctttgctagtctccagctcatcatgtcatcagttttcacttgcctcttaaccctttggaatccctcaccctgttgcctttcattgccactgtcctggctcccatctctagaaatttaagccaggcaacttctagctactaaataatcttagtgcttattttctatcaatcccaggtggtttccctacacaggctgtttcatggctttctttgatcgcaaaaccctgtccttcttccacttcctttatcttagcaaacaactttattgaaatttatttactttattgaagataagttgttcagaaccatttctgtcacactcctgtctctctccctccacctcccactttctcttattcttcctctttatttcccccatttcaaaggctcacctctccttctctgttcctcattcaatatccattagggtttaaattctttaattagcatttccaactctaagctctggcctctccatcagtaaacatactcaagtctctattttcacccccaaaattctccaaagagaaatgtatcatttattcactgtatccttatcccactttttgactgaagctgctttctctggagatctctaaagacttgccaataccagtgggtacatctgagagcattggacactctgatcaatcatgcccattaaatatttccttggtggcctatatgtcaagtcatacactgaaggcaaatcactcaatcttggacaaaaattcaaaagataacttctctagaatttcatagtcactgctgcatagctgtccaaataatagctttctgtaaagccttttaccaatctggagccataaatttaccataagaatcatgagcacggagatgggcgtgattccttcacccagacgtccatgacttggtctcctctgagacgccaccatgtcagagaggcccttgtgaccacccaaccaaaatgtggctcccatcactctctagtctcttactctgtgttattctttatagcattcatcaccacctgaaattattgtatctatttttgctcctcctctaaaaggtaagcactgttatgaatggtcccagaccactagttactcagtaactgaacgaataactgaacaaagaaaaagtgagctatagtaaaacatttgatgtgtgcttacatgggtttaatcacaacattgtcttctagggtcatgtgctgagtgagggcaagaagttccagggatagccagaagaacaacctttaaaatagtagaaggtgcacgctcagtccacatgcctgcacgtggagagtgacacttgcgtaccaatggtttgaatcactgcctgatttttcaccctgtgctgtagagcagttcctcatcacacggtattgtagttagtaatagagctttaaagcaaggaaaaggcagaatgcatgtgtgtgtgtttgcaagtgcctctgtaaccagactcctctatctaactccgttttaaaataccgtatgtgggcaacatctgtgcctgagatggagatttggccagaatgttaaaaaaataaacatggcggttcagctggatactggcaaccagctaccgccccatggatggccgcagagaagattcatgtatataaaatagtatattaaagtaaacttacaaaagcaaagagcaatcattgcaaccataattttttcttcctctttgggattctaattttaaaagcattaaaggagacagctgctcatgctgtgatatgcgctaaacagcctgaaggatagaaaaaaatatatttgtagctcataataactattgacctttctgatatacaatgttctctgtgttagctattcggttctatcaacagtgaagattgaacatgactttttaatagaaaacatggggtttcgagctgccttcacaaaggtgtttatgtattgttattttgtattgtagtacaaagactaagtcctgatgccctttgtctgacatgatgtttgtcattaaaaaaaaagagaaaagaaaaagaaaaagaaggaaggaaataaaagaaatagaaaggggggaaagccctcaatgttattgactgtgtttttatatgaagaattggctcataaccactttatagttgtgataaaagcattgccacactcgatcccatatgcaatattggcaacggaatccacgcagcatcgcaggaggacatgctatatttttctcccagaatagatccctcaagtggcaacatttatagggagtttccaataagatttaaaacactcacttgcagtattcatgtggcacatcctttggagtgcacagcctgctgcagaatgggtcatattggataccatgtactctcaaaggcgatctttacgatactcagtttttcccccttgaactttcccgttgcttagtagttgtgtatagaaacacccactggtagcagcttgactctgacactgtgtatatttccccagagtggtatcatccaaacaccaactgcagagcagcaggcagccagcaaacactctcttctccctcaggggacagtctcaccaagtagtaacccctgccaggagcaagaaacctgaaaggcaacctcatgcattacaattctcattcgagacaggccagatagtcccagggagtttatggtgacaggtggcattggttggcagactattattttcatattttaggtgggttatttttaacgttactgttaaagaaggttattacatcattattgaatcacaattattttcacagctatgctctagagtttcagttaatgattcacaagtttctaaacaatgctgaagactcacaactgggtagggacaggaatcagccctaaggagatttaaatatatcagacacttttgttggactccagagcaagcattgaagctgataaagtctgactgctgagccaaagtatagtggctgcaactgcatagtctgcaaagggtggtacaacttgtgactgcagaaaatggaaggcactgcctcgccaccagtagtcaaggatcacactctagtatactaaaagccgttacccgcttcagaattgccctggcacatggtagaagacaggccagtgggatgaaaaccaactctcaaaagacagagaacaaagtattctctaattctgggagaaatcaggccaacccccctttaactaccaaacccactggcctagaactctcaaaagaacactttgcagaaaacacttccttagagatgaatacaaggagaggatttaatgatcccctccttcaagagaaaaagccttcttgggacatgatattgtttggtgtgtgagagagtgacagggatagagtgaagaattcttcttagaagaaagtatctgaatgtcactttattttgacacgtgtaactgaatgcctacttatataaagcacaatcctaggcacaaggaagactggagaacaggaaagagagacaacaaaaaacaagttaagacatcattcctttctttcaatatctttcttacagtcttgtacatggcactatcgatgacatcttttgcaaatttcccattttaaaaaagtcaattgggcatttacttttgaaaatatagaccctacttataaaagtcaatatttcaggtagtgtgccctacacatgtaaattcaaccagttatggacacgctgggccacatagttttatccatgaacatgatcgtcacgtatccaaaaaaggctatgatttttccaaaaagaggttctacattaatgctatatgagttgtctggtattggataacaaattacccccaaatattgacggctttaaaaaagcaaagatatctcgcatagttccttcaggttagcgatctaggagcagctgatctgtgtagctctggctcagggtctctcatgaggttgcaattgagatggcagccggagcacagtcatctgaaggctcacctaaagctggatgatccagctctaaaatcactgaagtgactgttagtaggaagcctcagttccttgttacattggcccttccataagactgactgcctaagtgtcgtcccaacgtggcaactggtttccatcagagtgaatgacccaagagagcaaggagggagctgctgtgctaatcacacaccatcgattccaccatatgctcattattaaaagcaggtcaccaagtttagcccacaccaactcgaggggagaagtagtagctccaccttttagaaggaggagttttgaagaatttgtagcattttaaaactaccacagatgtcatcctggataaacataaaatcctctgggataatttctatgagaaagatttatttttaccatgcttgtcctgcttttcggaaactaggttgggaagatcttattaaattcactatttagtgaatgttagttactatatatatacagacatacacacatatataaatagacatataataataatatacccagaataaagattctatcaatatatagatgcagatatctggatacctgtataaaaggagccacactaagtgctatacagcatcaaagttagactcatcttagccctgctgccctcaaatatctagcaaaagagattaaatggagataaaataagtacataaataactgtaagaacagtatattggcaacctcatgacctttggagtccgacaaacatttgtcatattcttgctctgcccctagctgggagaacttggaaacataaatgactcaaagaataaataataaagattttgtatttgtgttagtcagtatgggctagcttaatgctacagtaaaaaaaacagtccccaaattacagcaaagatttatttcaataaggattggcaggggttctgcttcacattgtcttccaagactcaggctggtgaagttgttaaaagtcaccaggacacaggaaaagagaaagcagcacatcatgactggctcttgaaaattccacctgaaagtgacatgtggcttttgctcacattcattgactaaagcaagccacgtgagcatccctaactccgtgtggctgaggaagtgcagtcctctcatgtataaggaaaaattttgcaaggaaaaaaccaacttgtcaaatcccagtggatacatactcattctaaagtcctaaactgcatccatttctagcaaggctgacagcatatgccagtggaacaatctggctttatcaagatcattgcaaaatgaaccaacacctcttttgccttgttaaagtcattttggataattgctctttagttcgtcctgtgtgcacagaacacctaaaaatgaaaagattcatttaggcaatgatgtgggaaaagaatgtgtttaacttcatgtcttaacaacctatggcaactccacttctcctttaaaaggaaaaataccttacttacttttgaggagtaacatttctcaaaactttttttttctccctcacacatcaggatttggtgggggctggagggttctgacactttaattacagtgaaaacacttcaagtatactgaaaaagaaaggttcttggctgggcacggtggctcacacctgtaatctcagcacttggaggggccaaggctgtgaatccctgggcaacatggtgaaaccccatctacaaaaaatactaaaaaacatttaaaaattaaaaaatagccaggtgtggtggcacgcacttgtgatcccagctactcaggaggctgaggcaggagaatcgcctgagtccaggagtttgaggctgcattaagttataatcacgccactgcactccagcctgagtgacagaggaagaccctgtctcatttgaaaaaaaaaaaaaaaaagagagagagaaagaaaaaaaggccctttttaaaggcattggcttcatactcctacagagaccctggagagaatactgaaagtgttccaaacaaacctggccctagtttcagcccagtgagaactaggtggctcccagacacctcctctttctgccttctttaccgcctcctgcccctacataataacaaggggaacagcaaccacaccaccagctagggaatcatgaacagatgtggagtaattcagatatcatttcacattatggtggcatttgccaacataaaaattattactacttttgctgtaaattttcctgtaaattttacaaaatatgcaaaaactgacatttcaagagctgagataatttaggtttattaaaaagttgagaccttgagattgagccaaatagagtatatttctttatttagcttttagttgtgtaggtcttgttctttttttcagctcctagtttataattcatagggcagagctgggcgcaactgggctttgaccacttaatccagctttacccgtagatttttcctgtgtctcaggcagcagatacaacttctctaaatcccagatttcttatcagagcatgcaacaattatgagctgcctcaaaaagttgacagaaaagcatttcatgtctagaaagcactctaaaatgcttcttagacataaactgttgccactgtctttatagagcactattcctaaggaggcttttctcactattccatcttctcatcctctcttcgcctcatcccacacacatgcacgcatgtgcacgcacacacacacacactttctcttcagtgccacagtggggtcacacaccaccaaggccgtgctgccttggatctcccccaatagaaccttcatcaaaatcacgcctctcacgtgagacagttcaaaagcatctcttctaaagctgctgctctcatctgtcacatgcagataatctgtcttttcacatgagagacaccattgtcacagctgggataaaccaagtgtatttgctagctcttgagaacccatggccatggtgtgtgagctatgaatgactttattataataaacgtggctccttacttgtgcccctgtcctcagaagtaggaagtcatatggaatttcagtagaaattgtcatcagaaaccagtctctttctgggttgccctgtctccttctcttggactctccataccacatgctcttgaaataaagcttgaagactagttttgattttaaatatcagcttcactgaggcaaaaccgaccttaacactccccgcttacaccggttgtcctgggtataattaacgttgcccctgtatgtttaggcaattactgttgcaacatgtggtacggtgccatactcctgcctcattcagggcacgatgccgtgattggctccacagctcacgtgaagcttgtgtcttcacccagctggaagcacccatgctgtggtctctaatgtaccctctaagtgttttactgtgcagttctccatatagaaaacaatgatttctcacaatgcctgcattacccaccctttctacaagtttggtagttcctcccttactgggtcaggggctccaggaccccagcgctaaaacaggtttcacttctctgggaagcttcatttttcctcatcaattgcaaacatgatcttgctgaacagagctgaatttttaaggctgagtttgtggtgtggttctgatggcttcacgttagttcaagtctctgaggaccagtgccaataaatgtgaaaggaacaacagtagattggtatacttttccatttccaccaggatgaaaaaaactgctataaattaagtctaaccttaaatgtataatctgtccttgggaggaaaaaaaaaaaaaggatatagcatcttcaagctctcggcatcccttacgagaaaaaattggttctaagggtctctgatcttgtgttttagtaaaatagaactgcacggctgactgacagttctgatctaaagcatttacgtttaagttttgatctctctgcttttgattaaaactaatgagctcatttaattcaaaatgggaatctctgataagagaaataaggttgatgtgattggattagaggggcaaattaaactcttagagcagaagtttgtgcttatatagtgtattaaaaagctgttggcgtattatggcgtgttagatgatgagaaaaatttcatagtaattcatatttaatcagaagaaatgaaagtactaaatataacatggctctgcttttccctcgagtgataaaaagctgtacatttaaaatgacatcagattcatgctctctaaaacaaaaaaaaagaggaaaaccttaagagagacacataagaaagggacacttgtcagtgattccatcaccccagaatagaaatgccacaaaaataggaaaacatagtcatgttaagataaaaatgatagaagaaaagccccagaccacagatagcaaggtttctgttattacagtagctctcattcttctttcatctgagcaccaagtttaatatgaaaaagagattactcacccttagaaatatatggaatgcatttcatacttcaaatttaaaacttgttttgcccatttttttctcttgttaataactgttttcacatatacttaattcttaaatctctttattacacatatttctttgcccttactccagagaaaattagcgttagcatacgactactcgaaagaaatcctgtttcttggacaattttttttttacttttgaataagaaaaacttaagaagagtataaattagagtatttgttaggcttaaaaaccccaaaattaatttctttgccagaaaacacttaaatttataaaataccttggaagcttgtttttaaagaaaatagatttttacgttgccttctgacctgtttgcataaaggtgtttttacatcagcaagacggcaaactaccattttaagtttcataagcaaaaacattctacttagtctaaaagtacataaaaggaaagagtgactatcttgtttaagagagaaaatcattatttcctcatatcagaagcagagaggtggaaaaacagactgtttcctgtttggagggttggggttgaaagctgctgtaaagtgacaggaatggaaagttggtatcgtgagtagtttctgtttctgtctatacatcccattcttatccctccatgtcttatttatgcttcttactccccatgatgaagaaaaccagctccgaggggtgaggacattggtcaggacatgactcttccaccttgatagtagatcccaaactcccagtaggcaaatggcacaagaatggattatcggggagaacaaagagcaagccttccttaccctttatcagaagcatctctgcctgtaccttagttgacctcataaatctacgggtccttgtctttcatgacagttctctccatgtgcaccagcccagcctcaagtaaactgcagttacttatgacgagaccccacttaggcagctgctggaagtaaaaaggcctgaaaagctcttgttagaaactggaacgaggtgactctagatacattaatttttcttttttattttccgcaaagtaaacattttctaaatgaggtaaattgattactactgctcttagcacccatcagtcatttatttttagtgaactcaaggattgcacctgagctgtagctgtgaggggctgtgtcaagatctaaatcgtgtgtgtctgtatttttgtattcctcagtggagtcaaccagccccagtctgctaaccactgacaacactcttgagcgttcctttttcatccgaatgaaatctactctgaccaaacgcggtgtgcacatcaaatcatcaggatataaggtaagccggttccgggaggggagacattgctgtctcaggccagtcctaggtaatttgcattgaattttccagctgctttaggtccatataatgaatacatgtgatcttgaggagcccataggattcccagtcatcttcctgtctcaaggcaggagcttctttacacctctccttctcacttcagacattgctggtgcactaaaaaccccaatatagtgtcttttcttaacacattgattaaaaatatgccaagtgcttcagcacctgctggaaattcactttaatggagaaggtgagccaatttcatatcagtcctcaagacgagtgctctaggactgctacttaggagagttccacttctctcgctttccccttcaaattctccctttctctttacagaaaggctgtccgttttaataacatcttagccaccgagatttgtacacatagacgagaaaatcagttgggatattagaaacctgaatttcaaaactgtatttatggaacgtgcagtcacaccttagcattcatagaatactcgatatacgtaagttcctcacaagcaaagaccaagtccacagtcaaaatctacattatcatcattttaaggttaaggatataaaagccttcaaatctcaggaaattccaatgtttcagttactatagcaacgtaaattaagacctatgaaattcatgaaatgcctttggcaaccggaatcttatcaattttacaacacactaaccaatctcaaacaatattgattatctgtgggagggcaaacggaaatggcatgtgccatcaatgtggccagccgttgtgaccttccccagctttagaatttagaacttctgatagttcagttctttaaggcgactgctgtgttatcgcggatggtaacagccagtatcattaggccttcaaaaccttacctaagccatcaggagactagcagctgtatagaagtcagagtcaggcactttctttgatattaattcttcagaaaaacaagagaggtgggaaagcagatccttccaagaaagacctttagctgagctgtcctggagtctaaaaggcacaagtggagcctccttaacctttagcaggtgcgatgcagaggagaggcaagtgggcagctccacctgctctagctctacccgatagaggcttcttacaaaggagtgtgttcagggaaagaaaacagaccctatccttaggaccattttctattgccctgccttgctgcattcattagctaactatgtagccttagcaagtttggagttctataagcagaccacagatgttgagattcttgttattttaatgctagaaagacacattctttgcatttcagattttaggaaccatggggcttcctttctgttttctgtctctcggcattctttcttcacctttattcatttttactggtttggaggggcacatcccaggagggaagaagggtgccaggagtgagatatagtttcaaaaagcaatattaagtataattcaatattatttgataatttaatgttgattaaaatttttttcataccacaaactagagatcataaagtaatgatagctaaaattaataacagccagtatttaagaacacggcaatatgctgggcatgatatagttcacatgtgttagcccttacaacattcctaaagtgtttttgtttccattttacagacaaagaaactaaggatagaaaactaattagcattctcaatgtcacacgttgaaggtgcagagccagggtttgaacctggggagtccagctccataccacatgcacttcaccactaggctatactgctatgcagatagcaaagaaagtgtgagggggtggctgatgagggcaggaggccactttaaataggaagattataaaaggtcacgctgaggaggcgggatgtcacctatgagtggtaaatgagaagggaccatcatgcaaacaaatggaagaaagatgtttctgaagcaacttgggcttaggattaaagatgctttgcagtaagaatgggccttccagaaacaaaagacgtaaaagtgcaaccttgaacatccaggattggaaaagatttaggagctattccagatcccatcgaatcatgcaatgttaaagtgaccatactcccctgacataccctgtcagcaggtctttctcaagataccatgagagtctccagccgatgccctactctcttccccagaactactaccaacaaaagttgattcatcctctgttccccagtaagatgaatcatccagcagatccagctcttcctctcctcctcctcatctgcagtgaacttccctcattaattaactttgtctgaaagttagtggaagagctgaggagagcccatggcatgacacagctgaataacatccctatttatctgttcattctcagtgagtaaatctagcagcttataaaacattccaataaaactggtaatcaccccaccaccacacaataaacacaaataaaaagaaacagtgataatcatttctctgtactcccaatattccccctaatttatgaccattgtatgcatcttttcccataaagatcctaagatgtcaagctttgctcagtgcaggccactatatttctgtccgtttttcttgtgatcttggcacatggacctttgtaactttctccatcactttatctgttgttgtcgtcataggaacaaaagtaccacttactgaacattgactgcgtggcagccactgtgccacatgcttcacagttatttaatccacacaacaggattatttgaaatcctcctctatgccaggcatggtccaaatgttatattctattattatgcccattttgcaggtgatgaaactgaggtcttaataggtgaaatactttgcccattttcatacagcccttaagtagctactgaagcaccagaatcgaatcctccaaggctgtccgcttggcccctctgcttcactgcttaaaggattaagtcccaagaatggctcagcatgagctgacctcaacatatgaaaaagtaattaacttaaatttttaaaagaaaaacttcttgcctgattgagaccttccctctggggctcaccgtatcccactgcactagtgtatcggtgcttggtgatcccaatgcccccaaggagttacagagatgtacttcttttccaggactccatgcctactcacattccccatcaccaagaattctagccaaggaaataccaacctgcatctgctaatgtgagttgctgttgcagtgtctgccacacccccttcctcaggaaagtcgccctctctccagtgaagtttcccaaatatgagctgacattcagttgtttctgtcctcatttgctttgaaatccacagtagcatgttatccggaccagccactttttatgcctcaggggcttccctgttgtttaggcctcactgttagtcacatagcatagcacagctctcatttaaattgcactgcacatagattctgccttcttgattaggtctatgtctgggggaacttgctaggtatagcgcatggggtaaaagaagatatgtaatcagggaaattagagaagggaagactaattgggtcgcctccttagctccgtctttggaggatagtttcctttggcatgggactttcagttttctgatctcttctgaaatgcctaccagctccactgtcatttccgaagtatttatccacacacattatgatgtcctcattctaatggcacagtagacagcctagactggcaaacgtaggcaaacggagaaaagctgtcatgtttatataatgctcggagtgtcttcaaactcttcacagtggtgaaatcttcagatactggagttcctgctatgacatacgcaaacatattactaagggagggaggatgcaagaactcaagattcttcaaaatagtcccccatctgggatgatttgggcatggatttacctgtagctaggtactaaactaaatgacttctgaaatcctacccagcctcctttatgatataaagaattctaaagaaataataattggtagtttcactagtttattaggatcgctcatatactctagctttaagaatatctgcatctaaacatgaagttacaaaattaacgagaaggtgctaattagctaaggaaaattattttgccttctctaagcccaaacataggtgtctcttaaattagaaacttctcttgttactagaacttcatagttgcatatgctctgtggaataaggtgcacatgaaattttaacagatttgttttatttggagtatcatagagccctttaaagatttgataaaatctatagagcctctcccaaggtaagttcattttgcatcattttatccattgattgcaggttacaaaaccctatttaacagtatgatatcttcagcacttattaagaaaccaagttagtgcatcttccagaacatattccgtcagtatcacaatagtcctttccttcctcctcatttctccctcccatttatccatccagtgttgatacatattgaagtcctatacctttctgccacactttcacctggaaaactcttactcaaccagtatggccccactcaaatatcacttattttttcatttcccctaatgcatataagtaaagttatcccttctcttctgtgctaaatagcattttgagattttacttacattctctgtgcctcattttcttacctgtaaaatgaagctattaatagtacctaaaccaaagaattttcctacagataaagtgagataacacaggctcagctaggcatcttttttccattttatgatgtactttcatataatatcatctgaacttcacaataatcattttagaaaattatctgtttcctcaattttgaagataagtaaaatggaggcatagaaatacaaattgacttatctaaagtcagataaatggtaaatggcaagactgagaaatatccagatcttctgatttcaaaagccttctttccaatacccaacattggatactaggtactttgttatcctgttttcttccctcagcacctagcacagtatgctgcacatagttgtcactcaataaatgttgatttaattgaattgcatgctctctttccgatataccaatgaaaactgttgacagtaccaagccctatggcataccactagagatcctgctagttgacatcagtgtcttttacatgtgactgttggaatagctatgaacccaaacgattgtaccgtgatctggctcacatttctccattttgcctacaaggatattgcaaatctttatcggtgctttactaaaactgaaacatactgggtccatagtgttccttttagccatcagttgaagattccattcagaaaatgagaaatgagtcatgttagcatcacttatttatcatgacttcatgctagcctgtggtgatcacaattttttgttaaaatatctttcgataatttttttttctgaatataaacatttcgggcctctctctttctgaaaattaggataatacttgccaatatcctgtcttctggaaaaactccatgatttctcagggattgctaagaatatgtgacatattataataagaatgctgattcttatggagttttaattataccaggaaaagtatagcctggaggtatgcccagcactaatgtagggagcaatgtggtagtggtccttctctggacatttctaagagcatacactgaactcatcagctaggagtctcctcctgctcccagacaagtgtggatggactagatgccacctggatgtttcttccttatctgagattcagagttgttccaggtgtccagacataccaatgcttctcctaaagccttttgcttcagctttgtgttgtcgtgaaatgatgactacggcattccaagttgtgcaaaatgtaactgtcttgtcaaatcaataggtgaattttcagagaccaaaaattctgtcaacccattcagagtttctaaggctatgcatttattgcctttcaatcaacccagacacccaagataaattgaaggagaaaaaatttccagggtggaacttacaggcagaggttatcctgatgaaaaatgcaaatagaggagagaaccaataaaatcaaattttttaaatccttttacctcgttttagtctctgctgacctctgcacaattgtccattacaacgtggtttccagtgtcattttaaatacagccggcattgtttctgatcttaaagaatttatttcccattaccaaggcatgacagtagttccagcttgggatatgtcatttctgctgggactaatcagctagctattttaccaactagaggcataatcactagccattctgggaagtgtctttaaattctaagtatgtcagtgactgcagcccaagtatgttgctaacttaaagatccttcattttccgctacagagatttcaggaagcaggtaggggaggtaacagcatctcttctctgactaatgctgtatcttttcagatcagttttctgagcctttgctagctatgaataacaaaagtgatgatcactttgaaaatgacacacatatgtatatgtatgtacatatacatacataaaaaagtaacaaactttcctatatataatgtcttttaaccaactattgctcctaaaagttattgttaatgcctctgtaaataccttctcaacctaatagatttatttatataattatcactattatgagactttggcctattacaatgagttgtaaagcagacctaagaactaaaaaacaaacgcaagcacaggtcatttttcttcaggctttgcactctttaacatgctgagatgccctaacaatagctgcagacaccccacatttctgtttcactaaagtaatctcttgacctggtggtctgaaatagcagttactaaactctttacagaaatcgaaggtttccagatacaggcatatcttggagatactgtgggtttggttccgaccacgacaataaaacaaacgtgggaataaatgagtcacatgaattttttggtttcccagtgcagataaaagttaggtttatactgtagtctattaagtgtacaacagcattatttctaaaaatgaatgtgcatatcttaatttaacaataatttattgctaagaactgctaacaatcatctgagccttcagcaaagtttttgctggtagagggtcttggctccatgtggatggctgctgactgatcagggtggtggttgctgaaggttggggtggctgtggcaggttttataaataagacaacaatgaagtttgtcacgtagattgattcttcctttcatgaagatttctctgtaacatgcaatgatgtttgataatatttttcctacagtagaactttcaaaactgaagtcaagcttttcaaacccttatcaattaactttatagaatattctaaatcctttgttatttcagcaatggccatggcatcttcaccaagagtaagttccatctcaagaaaccactttctttgttcatccataagaagcagctactcatccatttaagtttcatcacgagactacagcaattcagtcacatcctcaagctctacttctgattctaattctcttgccatttccttcatatatgcagttcttccctccactgaagtcttgagcacctcaaagtcatccataagggttagaatacacttcaaactcctgttcatgtgacctcttcccatgaatcacaaatgttcttaatggcattttgaatggtgaatgctttccagagggttttcaattttctttgcccagattcatcagaggaagcactatctatggcagctatagccttacaaaacatggtttctaagtaataagacttgaaagtcaaaattactctttaatctatgggttgcagtatggatattgtgttagcaggcatgtttacaacactgacccccctgtatgttgccattagagttcttggatgactaggtgcattgtcagtgaacagtaatattttgaaaggagtatttttttctgaacagtaggtctcaacagtgggcttaaaatattcagtaaaccatgataatatacagatgtgctgtcatccaggctttattgttctatttctaaagcatagacagactagatttagcataattcttaaaagcataattcttaagagccctaggatttccagaataagtgagcattggcttcaacttaaagtcaccagcttcattagctccttacaagaaaatccacctatcctttaaagctaaacattgatgacttctctctagctatgaaaatcctagatggcatcttcttccaacagaaggctgttttgtatccattaacaatctgttgtttaatgtagttaccttcatcaatgatcttagctagatcttctgaagaatttgctgcagcttctacaccagcacttgcttcatcttgcacttttatgttatggagatggcttctttcctcaaacctcatgaatcagcctctgctagcttccactgtttcttctgcaacttcttcatatctctcagccttcatagaattgaagagagataaaaggtcttgctctggattaggctttggcattatggctggtttggtcttctatccagaacactagaactttctccctaacagcagtaaggctgttttactttcttatcatttgtttgttcactagagtagcacttttattttctttcaagaacttttcctttgcattcactggttggctaactggcaccaagaggcttttggccaatctcagctttcaatatgccttattcactaagcttcatcatttctagcttttgatttaaagttagagatgtgcaactcttcctttcacatgaacacttaaaggccatgctagggttattaattagcctaatttcaatattgttatgtcacagggaataaggaggcctgaggagagggagagagactggggaacagctggtcattggagcagtcagaacacacacaacatttatcaattaagttcacctcttatttggaccatgatttgtggcaccccaaaacaattataacagtaatatcaaagatcgctgatcacagatcactataacaggtatactaataatgaactttgggccaggcatggtggctcacacctgtaatcccggcattctgggaggcgaaggtgggaggatcgcttgagctcaggagttcaagaccagcctgagcaacatggcgaaaccttgtctctaccaaatatacaaaaaaattagccaggcatagtggtgcctgcctgtggtctcagctactcaggaggctgaggcaggaggactgcttgagcccaggaggcagaagttgcagtgtgctgagattgcgccactgcactccagcctggacaacagagtgagaccccatcccaaaaaagcaaataataataataataataatgaagtttgaaatattgtaagaattaccaaaatgtgatgcagagatgaagtgagcacatgctattggaaaaatggcagcaatgaacttgtttgaagcagggttgccacaaatcttcaatttgtataaagcacagtatctagaccgtgtgcagtggctcacacctgtaatcccagcactttgggaggctgaggcaagaggattgcttgagcccaggcattcaagaccaatctgggcaaaacagcaagaccccctctctacaaaaatacaaaaataaaaatacttagccaggcatggtggcacactcctatagtcctagctacttaagaggctgaggcaggaggatcgctcaagcccaggagttcgaggctgcagtgagccatgaccgtgccactgcactccagcctaggtgacagagccagaccagagaagaaccacagtatctgggaagtgcaataatgtgaaacacgataaaacaggaaacaaggaatgtatgttaccgtttgacctttattatctcaaaattactctactgaagagtgataaccagagcagctgtgacatcagacagctgaggatttggacttagtcctgcattcctgggtctgtgacttttatttaacttctttaagcatctggattttttattgtaaaatgagagtaccaatacaaccgtcttcataaggctattgtgaaataaaatgagatgaaggtaaagtgcttaccacaatgcctggcccatagtgaacacatacaatccatgtctacatgtgaaatttcatgtatagaggtgaatctagactatacaaaaccttaatttctacacctctgcagatgcacctgtacctatgaaaagtagtaattcatcagtaatatttcagattatctcctggaagttatatgagctctagaataataaatgatttcttccaaatatagaaaatgcatttatttctgggaaatttcttcttgcttaagtgtcctgaatattgatttgattataagggacaaaatatgactgaaatacgtcatctgttcctttaacaaaagaagcacataccaaatggttttctttgggattgatttagcatcatgggaagactaatatagcccttaatgcaagaaatgaagtagggaaaggaccaatttgaggttgttgatctctggaataaatggagtttctaagcctcctatatagcccgtaagtctccattgtttgattagagcatctatatcccagaaactgaacctgcggggaaggcaaactgcccctgtggcttgaaccctgctgcacctgagaggtagtatgcaacattccttaggggattctattgactcattcttttttattttattttatttatttatttatttatttatttatttttttgagatggagtctttctctgttgcccaggctggagtgcagtggcacgatctcagctcactgcaacctctgcttcccgggttcaagcgattctcctgcctcagcctcctgagtagctgggattacagatgcctgccaccatgcccggctagtttttgtgtttttagtagagatggggtttcaccatgttggccaggctggtctcaaactcctgacctcatgatccgcccacctcggcctcccaaagtgctaggattacagacgtgagccaccacacccggccctctactgactcattctttttttttttttatgatgtatttattaataaacttatagttaaatatatttgtaacactattattctaaataagatttaagactgtttatatgtgtaagatgctttacaaaatatggttgcacacagcaactctgtgagacatgtattatcactctcattctgcaagagaaattaccgagaattagaaaggttaagtaactggtgtaagaataaacagtaggtgaaaaaacatatatttctttttttattattattatactttaagttttagggtacatgtgcacattgtgcaggttagttacatatgtatacatgtgccatgccggtgtgctgcacccactaactcgtcatctagcattaggtatatctcccaatgctatccctcccccgtccccccaccccaccacagtccccagagtgtgatattccccttcctgtgtccatgtgatctcattgttcaattcccacctatgagtgagaatatgcagtgtttggttttttgttccattgtggaagtcagtgtggcaattcctcagggatctagaactagaaataccatttgacccagccatcccattactgggtatatacccaaatgactataaatcatgctgctataaagacacatgcacacgtatgtttactgcagcattattcacaatagcaaagacttggaaccaacccaaatgtccaacaatgatagactggattaagaaaatgtggcacatagacaccacggaatactaggcagccataaaaaatgatgagttcatgtcctttgtagggacatggatgaaattggaaatcatcattctcagtaaactatcgcaagaacaaaaaaccaaacactgcatattctactgactcattctaagtaaaagaagagagccaggaatctggagctgatagctccgttgtagtgactttccagggcacaagggaccaattttatctgtcccatccctctagggatgccccccatcccaccatcaaatgaaaagagtgacctcatcacaatgtgatttgagtaataagactcttacaaacaaaagaatcatctgtgtaatcaaattctcaatcatctgtagttacatctagggaagaagctttgggctgctgcctgggcaggtgtgtgtcttttatttgaactaccagtgagcaatggatatctctaagtggccatgttggaaacatcacctttggctcatagttgggcaattgtctatggaaacaaaagttatcccttgacttacagcagcatttacatatcccttctatcagggctttcacatctgctttttattctctctaaagtatatattgtcctgagatattcccatgggtcacacctgcatttcacttcgatttctgctgaaacatcactttcctcacctccccatctacaatatatcaagtgttccttctgcaccccatcatctgctttatcctgctccttactgttcttcatcacacttaacacaacctgacactgttttatacatgtatttgtacatagttttcctctcctactacagtataacaggaaattcctagaacagtttcaggcacacagtagaaattcaatataaacatttgttttttaaaaaatgaattaatttataaatattagacatgatttgtactaagccagaacatatttcttccttgggtcagtgttctacatcttccttgagtcagtgttctagtccctttaaaagaagtttagagatgagaatatgtagccaatggaattatacaagttttttagtattggggccctgatgataaggataagatgatactataacttttctttttaaaaagcctatactaatggttgacacattctatgacatatttttcatgctatcatattcagttttttaaaaatcaacgtgtatttaacttgtaccccacttgtacccaattctaggggctagagctctggaagtacagtcaagagatacttgattattacttggtagttttgaatatatttaacagtcctcaacagccccttgtcaaatgtccttcaaactcatgattccttgtagaagtcatgaaaaacagagtgccttaataggggcacacctggtggggagagtcaaaaaatttcatcccactaccagcactttgcttcttacttgctctgcaatgtcggacaaacagcctgattatctgggcctctatttccttgatgaaaacaaagcgaacaattgactttgatgttcattcgtcattgatggttggctgacagtacctacccttgagcttcaccctgtgcattagtgctttagcccctttgagacattctgggtaaaatggaatagaggattggccttcccaggaacagcccctgatttctgggaagaggggaattaaagtctgcccagaagttcccaaagggtcattcagagtcaccaagaactgtcatattgcctcgtggtcaaggctagtttgagaatctgaaatattctaggaaacatttaaccaaatgaacgccatgagggaaaagaggtctgggaaggattttgtaatttttagggaggggtcagtgaacttttgcaccttgttcttagagagactatggatggactaaaaccaaccagtctcagaaattaatctatatcctcaactgaagacaaaaagtaatagtgattagagagaaatactcctttgcctcattccataaacagtggcaaatttcttttcctcactaactttaaacacaatatagattcacccctctgtttatgccaaataacacacagcatcatgttctttttaaagttatctatcttctttaattatttgcagttggcttattggtgaatacctaggccagtgttgtctgaaatgggtgtacgtttccagttttagggacctgaaatgtttaacctgcctagaatagccccataggcagttgagtcttgggtaaatgctcttctgtgatgagtgaaattaacaatattataattgtcaaactcctcaaagaaaaatataataggaatgtaaaatattcttgaatgttttattatgaattactatcttctctatgaagtgtgtcttttctttatactgaaatgatatagagagtgatgcaatttgcccaacaactcatagtggccagaccccaagccccttggcacagcggaggactgttaagctctgtggatttgatctctaggacaaaaaggtggcactgcgtagcacctccaggttctcatgcactccgagaaccctgaagtagacacagattgatgcagagcactcagtaagtgaaaaagggagtgaagcccagaaccaacacaccataccatcactgtcccacagagtgctgacagattgcaaagcctagagaggccattgtccaatcttcctctccacacagtggtcctcttcttggggaaaacatcagtggagatgtgtcacaagagcccaggaaacactttggcccccaaagaatcttttctctcttggattcataaatcacacatcttaatcatgccatccagtcctaaaaaattttttaaggatggtactctgctagtgaaaattcataggcacctgctcttgatttacttcctgcttagaaaaaaaatttatacagctgtgatattgcagagtgactccattcaaagtaccaaacagtgaggcgttgtcaagaagggatatgttggatgcttgggttatgatgatttcagctattcctttttttttttttcttacagcatcattagtactctgtcattctaataataataattcccttttgacatcatagaggtagaagaaatcatcactgacatcaaaaatgaggtgatatttcagcagtattatttcactgaagataaaatggagagatttattactccccatgcttttaaagaaagctgaacgaggcatatgctgaccctagagcttatctacttcagttccttccagactgatatgaaataactaattttacgtattctaactagagttttagaatgtagtttttttccccaaagctttgtttacatctacatagtggaaagttttttgaaaacatgctttctcagtttgtaataacctgagaaaacaaaagagaagtctagtgtaaccaagaatgatctataactttcattcttcaacaccaccctttgttcaaagtatttaggaattgatttcactcaatcatgtggtcaatactgattgtgtacctgttgtgtattatacactgtactgggtactgggaagacaaagatggataaaacagagtccttgatccagagagcagagtctagagttaggcaggcacacaaagaaatgataatgagataatgtgatatgtgctataatagaggtatgttccaagggcaacgggataaagcaaatgattctgtctggtataaaaggagaggatctcaaagacagcatcatgttaaccagctcttaagggataggctcacctacagagatatgaaggaagggaactctaaacagagggaatggtatcaataaagagatgaaggcatcaagtgtagtgagcagaaagaaatctgggtatcaggaataaagatatctaagctgagctggcatatgtagacaagagtaggaacgttcatgtggtgtaatgctagccccatgggctaatcagtgtttggggtcacaaggatgaagattaagagtgtttcatgtcaacaaaattttttggaatcattgtaagagaaagagcattattttctaacaagaagaacttgaaggttgctctcagcctattaggtaagggagtaagtatatagatttaaacaagtcattaaatcattccttttggaattttctccattcgtttttccttctaccattctgccaacatgagtgcagggactttttccccttaatctcacattgctcatataaatagacatttggagaagagcaatatgatcctagaaccagtaactcaagggaaaaaaaactaagacctgtatgcattgaaagctggcattgcaaaatgcatcagagatacaaagcactgcatagacctcaatcacttagcacttggtctacacaccattaggtatctagattattggaaatgtctctgtatttggtaaaatataagcaaaacctacatttcaggcgcccacagtttcccttgaatataccatttagtaaaacccctgacctttcaagatgataattatctctcattagaaaaattttatttgttcttcaactcacttaattctgattttggttgactattcagaatttctactaattatagcaacctttgtaaacagtgttgtctgagtacccaatccctttgtcccagtaagatctgtgcatgtcacatcagttacaagtgatctgcgattaaaacaacagttctcaagtgaacagtaagtgatgacataaaatatgagtttcataaccatgcaaatattcaaagttatgtgttttttaaaaaaatcaaatacagtatatgactactagattttcaataggagcaaaatttcacccctttctctccttctccccaaaaaataaacctttatattcctggattgaatgattactttttaaaaaacataattttcacaaagaaaacaaagaaaacctctccctttctttctaaatatttttgcagcatctgcataggctttacctttctataaaatataatatgaaactttggtgctttgtattgcagatcataagctgagttgctttcagctgcttcattttattttattttttttctttctcaaacatctttttcttctccagataatcagtgctctcaactgctctcaaatgcacgtacttctgtcaccataaagctagtgtaaccccatggagtacactcccaagccatgcaagagccatttaagagtagatatttttgtttaagtcagatctcaggatagaaggggacatcatccccaattgactcttggctctttttcatgtgcaaaagctaaaaaaaagaactggaccaagttgggtttgggtgtttgtttgggctttttgcatgtactaaagcaacacagagctgatgcacaataaacaaacatgcattatgggttgttttcagtcactttatagacatatgcattcataaattttgatacggttgtaagaagctgactttgatgggaccaaactcacagacgagctttcgatcactggagcaaccgcagtctaactttatgttgacaatgtatcagcccttctccgtcaaggaaaattgttttttagtgcttgcctattagcaatcacatgcataatatgaaattgagttttggggaggacggcctaccatctgtctttctgatattttttttcaatgtttcgcgctcaagttcaactctctgtgtatcagaatgctgtaaaacaggattcacccataatatgggcacttagcaagaaaaatgggccagataccaatgtaatcttttaacttactgacttttaaaaaggaaaatcattgatgccccaatctgtgcattatcttttgagtgcacttcaaattctgcctgcctctcaaagccaactttggtacggctgattcttcttaaagaacagttcattagtgtgcttcgagaagtgttaaaacacttttacaaaaataaaaattcaaagagaaagtggaaagcaatgtgaggttggaaaatggagctctaaaggattggtgtgaagaatgaaaaagatgtatttagtttcccttccatgttccaatatgctaagatttttatcaataatattgtttttctgcaacaatacctgcctcagggaaaatctgctctgtagctgtcaggattatacttctcaaaatatgcttaagatgattctgttaaattgataaaaaaaaaaaaaaacgtacactccacaatgtagaaggattgctcaaaagaacattcccaagcctttcacgtgtaactgcatttgtgcggcagggcatttattatgctataaattccatcactgattttggccagttcagattgattctgcagtaactgtaagtaatgaaccttccagagccaaagaggggaggaaaagaagtagccaatacacttgtggctgtgggaatacaaattgtagggttcatttagtcacagcttttagcagatcatgcagccaataccctacaaagcaagaaaatatatacccagaaaaatctacaggttccttgatctgacttcagcagctacaacaggcaaacactatgagaacacttcttggggaaagtaagtgatctattttttcctaagcttttatttcccaaatttgttccctctcatttttccctcccaccaaagtatgggcaaatgtccatgctacaagagcaacaaaatatggagctctcttttcctaagttagccatgcctgaagcttgcctcccacagttcccagtgccaggggcttaagggaccctcagcacagaagaagctcccaggggttgagatgtagcaatcctctgttcagatggttgtaaagaggaaaatcagtttccctagagtggttgatgcctgagcctattaagaaaataaggtaaccagtgatatgaaaagcaggagaaacatcctcttggaggtgccccgcgaccccactggggtggcggctagagaaagaattgggtgaaggaaagaagctgcattacagacagacagtgatctgtacttcagtaaagcattgctgtctaatattagagggcttttttccctgatattctttaaaactgagcactaaggaaataggtggggtgtgagggatggaataaagtgtgattggaatccggggtatcaaaagagacacagcagagtaagagcctttggccaagaggagggaggagaggaatatggaaatggatgacattcaagacacatttcacctactagggaggccaaggaagtcctcattcccttcttccccagctccctctcctctctgacctcatgttcgtggaatgcttaggagcaggggaagaatagtggctggagtcagcctcagagtgctggctctatggcggtagcatggtcagagggagaccatggcttcaatggaatgtgcaggcaatattttatgacagtccgggaatctgcatcctcatccccatcccactgaatttccagaaagacagaggtacaaacaggtaatccatcttagagaacagcacagcatctttactgtccttagtccccaagaacaaataccacaaaatctttcaagattctctctctcttctccctttccctcttaaaaatcatagaatcgtagagctgaaaagcctgtagacatggtgtttgactattgtgaggtacacctgaaagaataaaccatctggggcctttctgaagcatctacatttctcgctggactgtctgaagttatttggggtaaatgccatgacgtgtctcatagacgagaccatggacacagcaggacaaatctttagatagggacagtgagagttagccaaatggagacacatattgttgttttgggtaactcagtaggatgcagagccctggccttaggatcaacagatgtaggttttagtcctcgttttgccacttgatatatatttgactttggggaactcatttagcttgcctaagtctgttgaaagaggataatagtacctctcctgaaacatcgtagagttattatgaggttaatgtaagataatatgagtgaaaatattctgtaaactctaagtgactgtgaatacccaatattatctttattggattataactgtaaaatgtagggttttagcatttcagaatatattggcttagcttatgtttatcacaagtaattgacctcctcattttatttctattattggtacatttatttttgtgaagaaaagccacttttaacagaagccttcagattacccattttatttccaaagagggcaaaggcagaaggtatgttcataaaataaaagtaggaaaatagctgaaagttactaccatgacgccatccctgccgtggggtctgtgaattgcctcgggggaaaggattatataggagtggctatgaatcatggctgatgtgattaggctgcactctagaccgggtgggcgtgtgggcctttcaggactccttgtcattgttgctcacttaggttaatgttaagattagctgtctggtgttatttaataatattactgtcttaggccattctatgttgctatgaaagaataccagaggctgggtattttatgagggaaagaggcttatttggctcacggttttgcaggctatctaggaagcatgacacctgtatctgttcaacttctggtgagacatcaggctgcttccactcgtggcagaagggaaagggaagctggcaggtgcggtgatgccatggaaagagaggaagcaagcaagacagtgggaggtgccaggtctttaacaaccagctctcctgggatctaacagagtgagaactcactcacccctgagggagaccattcatctattcatgagggttctgcccccatgacccaaacacctcccactaggtcccacctccaacattgaggatctaatttcaacatgaagtttggtgagggcaaatacccaaaccatagcaattatccaactttgagtttgatttcttttattagtgattgaaagctttatgtatccctctttgcattggaataaagtaatcatttatcagagtcagtaatgagtaatacagagaccataagtttcttgagggagaaagggtaagagggcccagatgagccaaacccacctactacatagtgaatgccctggacaatttctggaatcccagttgggtggattcttgcagtacccagttgtattcacgaagtaactaacccccaagaagaatcttactaatatgttttctaaagggaatcttatattgaaaggtttttgaagtaaaagggagaaccagacagattgagactgctcagatggatcaaaatagcaattgggagtggcaagagatgcaaggcggtctgtgaaagagagcactgagcttggaggaatgtcagaattatattttagctgtgtaatcataaccaaacacttcatctctcttagcctccagctccttatttacagaaaggagatactaatatgtgctctacctaccttagaggctattgtaaggattaaaaagaaagaaaggaagttgagaactttgtgagctttcatgcagtagatagatgtagcatctaagcagtcagtcatcctgtagtctggtcctacgaggtacacagagaaataaaggatgcattctgtgccatctgaaggaaaacagagagtcagagacaaaggcagagacagcaagagagcaatccctggtagtacatacctaggtgctgattgggtagccgagacaaaagtaggaattcaaagggaggaggacagcactgggctaaagtatccaagaagaggaaaagggatttgatatcacccttgaagaatgaatattatttccactgatggtggggcatggggaaggaattcttggtctgaaaggtgatgtgagaaaagatatggagaagataaacacaaggcagattcaggagatgctggacaaagcatctggagtccagggagggaagtcatggaagataagccaagttgtcttggcttgggactgaagcttgagactgaatggacacaagcttttcatgatgagctaagtggtctgaattttattccagaatcaatcaaggctcttgagtggtgatagtgacaatgctgcaacttaatatctacatagtgctacaccattttcaaggcgtttttaaatgcaccacctcattccattttctcagcaattgtgtaagacagggatgaagaggatggtcactgctgttcaacatatggggaactgaggctcatagaggtcctgctgctgctccaaagttatacaggcaaatgaggaagaccctatagctcctggtctacttccttaaagatactctaggaagatgaatctgacagtaaaatgcaggatggaccagagtggggaagaatacgatgggggaaaaaatgagagagaccggttaggcagctgcccacccaattgtccagatgtgagatttcaagaatttgtattacagtgatggcacttggaatggatataccaagaagtaagaaaacattcctaggtcttaatgactgactggatctggaaaatgagagaaagaggatcaaggatgagccaagagaagtgatgcactccccttttctgcctttgaatgctgatgaaatggaagcattcgcagaaataaagagtggtccaaggttgaagcctgagtaaccagttggacactagtcctactgacattcattctttaccctcatgtggagaggccattccttttattcaccttttcattacagccctgatcacacacttgtcaggtcaacacagatggactctgagctccttggtaattatgcctcagtgcctgcacagagcactgccttataaaggttaattaaacattgaatgaatgaatgaacgaatgaatgttgtcacactcctaaatctcaggtgcagtcatataatcctttcttcagaattcttctgtggttccccctttgtctgtacatgaagtcacaactcctttgtacagcattcatagcattccacaatccagcctgcttcacctcctccagcacctccccacctactccactttgtcctctgtctgcactcctctccatttctgaacacaaaaagcagttttgtgtctctgtgcttttgcttataatagttctccaacctaataccagtcaaatcctactcacccatagaaatttaactcaaatgctgcctcctccctgaaaggctcgccctagtgccttgtcaggatggctctcctctttgctacttctgcacggggcatccctctgcaggtctcattcagggcttggccaatgtgtgcaactcctggacaagctggccccatagggcgtagcagagcgttgactcctattaagattttaaataggggaaaagaaagaaaagcggccaaagaactatttagggaagaaggctatgagcttaatttctgtgtcctctaatgaaatttacctctttcctagaaattcttctcaatgaaaaataatattcatttaaacattgcatatttatacaaaggaactgcttttttttctctgcctattaagatgcagggtagttctactttaacatccaaggtttttcttattccttactcagcagaaaaagcctactcaaacaaaaggaagaaactgacatatttggattgacagatgtcaagggacactaccatctaatttccttgttgattaatttgaaggtaatttcctggtaacccaggcttccaaaaatgtattttaagtggcatgttggtaaaagaaaattaatttctctgtgttaaacttgccagcttttgaattaattgcatgagcataacaatcaattaataaatgttaagcaaacaagggaaaatcggtcaattaaaaatgataaaattgattcgaagggtagataaaccaaaagtgtgtcataatgcccacttctgagtttagatctcctgcctctgtacaatttccctcccacttttctacaccacattcaaactgctgattctttattataatttcttataaataaattaccacctaagccctccttgctgctttattggcattaaagaagccaaacatacatagcagtcctccagcagctatggggagaaggtcattgctttgggaaagtgtgccacccacagtactctgcagaagtgtttttgaaagggaagccttttcaaagtggaccaatgttctctaaatatttaccagtacattctgtcaagaggaagctcagtatattgtcttcttttctcctggtcatacactcagatgtctcccagagatcaggcaaaatgggaagtggcagggcctagagagagtgcttgccccatcgcagagcattcatatgaaacattcttaaacacagtgctatgtatactttcatatctggagctgaaggtgacctggaatacatggatttattcttcagccctggattttgaatttgtttcttcacttgggaagctaggtgctttggaaataatgttttaagaaagtataggaaaaataaaatgtatctagtaaaaagagcttgcaggctgcgtagtctttataactataatggaagattgtcattatttacctggcctgctactggttgtctttagtcctgactgagtagcgtgttttaccacaaaatacttccaattgtccttttagacgtggattaaaaagaaatcaaagatcgcaacatgcacatcacaaatttctccattttgccaagggcatttagcataatggatatgataaagtttctagaatgatttttatttaagcatatataagatttctgaataaaattgggaaaaaatatcaagacttccttagtacacttaaatttctaagtccagctgaatcttcacttgaatgttgacaatttctcaatcttaagggtgaccaaaacaaaacccaccccaagatgttttgccatccacctgcccttcccatctcagtaagtggcaccaccccctggccaaaagcttaagagtatcctttcattccactctttacctgccacctcacaactaatacatcaacaagtgctgtcaagtcgaccttcacagggtatccaacatccaactacttgacaccatttcttcctgagctaccatcttctccctcctacctggctttcccaattttactcggggccccagagcagccatttaaatcagccagagatgtttatcagagctcatctttccccctttatctgtccttttcattgctgtatccccagaatctaaaatagcgcctggcaataaattaatctcaaagatactttggaacgaatgaaattatgtagtttggaagaagtgcacaacatgatacaggatcatttggacacttcaaaaacattatttgaccgtgtagagaccaggaaagactaggacacccacccctgaatgtgagtagttcatacatctgtcattcaactgctcgcctcatcccttccttctaaagtgttatggaaaagcacatatcgtgggtgagtggggtcagtttgcccatcctgcctaaagcctctcctttgggggttatgtctgcctaaaccaaacaagttaaaaaaaaaaaaatcaagtgctgattccagttattttaaacagtttcatacttacttggcaattatgatagcacaagtctctccaataatcaaaagaatcattacttgttttgctaaaatcccaaggaaatagcacaatatgtaatatttcggcactaatgaggttgtgcctgaagaagtgtgattttaattatgatagatttggagaatccattgcaaaactgcaggagaacagcatgttgtaccagttccagggaaagtgcattaatatcccatgtttttgttttatttagtcatcactggctgtgtggagaatcacctaaggtaatgatagagctaccaagaactacatcaaatagaaccctataaagaaactttattttctcctcccatactatggacagaacgtgtactacaggggaatatttgtcttgagttgtcttacaaacttacaagattgatttgcttggccactgacagttttgatcctaacacaacttttccagcaccttccatccttcaaaggttgaaagtcaccacttaagcacagtggctcactaagcctttacactggcagagagaggaaaggagtttctgtagaatttcacttcattcaaaagactgatctgggttgggtttgaaagctctgggtggaagtctgcatatgagcagggcactgattacttcattagaaccctgtgcacttcaagagccatatgctttcaagtttctttaaatggtattagggaaaaatatcctcaaggcattatttttaaaggggacttcaaacattccccagaagaaaaaaaaaaaaagagtatagcacatttgaactcaagggggtttcaggagaaatcttacttagcacgactgtgaaaatggaacaatcttttcagtttcagggtaaagtcagcgttggtcacaatcagggataaatttgaaatgtggatggagaaagatgcagaaaatctccaaatccttgaatccttaccataaaatagcaaagaagatgacttgaggaaggaaattttttaaaaatatttttgttcttacgttcgagggaatagggagaattgagtgtcttgcacagtgcaaaaattgatgaattcttcccatttcattccacatagaagatccttgtaaaataattctccatccccaacttaggctacatgtactcaaacatattttaaagacccaggaagccaggctacaggtagaagtaaagctattcattttgagttttactgcagaaggtctgctccagaggtcaaatcaaagagatgcttctccaaatttaaactcttcttttctaaatagatcccaacctgatctcatttaatgcattgatgtttagtttcttaggcattataactgcagtataacataccaaaaggactcttgagaaattctcccgaattgataattctaatttcttatgtataactactctatattcactcagaggacaactgtattgtatgctaaaccatgaatcataaaaattggtccctttgtatgtaggtttgtattaaattgagatgctgtcttttttttttccctgtttgttcccacacttgagttcctgatgtcagtttgtttttggcttcttgagcatattaaagtttttctagtgcttatgatgttcttgccaagagcacacttgcagcaatctgcactagaacagtctttgtgccaattacttcaaaaagtattctttaaaataaaaagggggagggaggacttttatttcagggaactttcaggttatagtgtggtggtttcaattttaatttttagagtcaatcttcctgaaatgatgacttacaggctctggaatgtgcatctttgtttgggggctcttttttttaagactttctacaaaatggaaatcctgataaagacatacgaatagcagcgggaatcagtggtatggaggaaactgctgtcgctgctgacaccacaccctcatctatttaaacagctttggaaaggaaactgctagaagcttgttaaggagtttccaaatgtgtgactgtaaatgactatctctaatcatggctgaataaaccaaatgcagcaaatgagttggtgacacgcacaaaagtcatatgagtgttttgaattgcatatgctgaatagataataacctgtgtcagtgccgtggggtcttttgaaggttaaaatcttaagtttgatcgaatcatttatatagagagaaataagcacatttgggaaaacaaaagaggaaaatggaaggggatatgttctctgaaatgtaccactgaatagtagaaaaatcgctgggcaagagattaggagacctcttttcttcttgtgtctgccactaactggccctgcatcctcgggcaggacatttcacctgaccagacctcagtcttcgcttctttaatgtggaagggttggccgagtggtctccatggccccctccagctccagcttgcttgaggtctttctgggatgctgaacacaggaggtacttggcaccgccgtggattcatccactccataaagcgagacatttcgagaggcatattgttaccagaaattactctcatttaggatgaaatagagggttgaattaaacagccttttaaaatattatagagttcagagggtagcttaagaaacatggaagaaaatgtcctgtgctaattaatattaaacacagaacatctgtgcctagcaaagagtgtaaactaagaagagaatggagatagaaagttacagaggcttagggttttggtgatgggtcaaggctttgtacttaaagagactggattcaaatacaccctgctaaggaaggggtggcctcagatgcagtgtagtcaggctcactcactttcccaatgaaaaaatagatgctgagaaaggaggtccttgccatcaaacaggaactacatgttgtccaactatgccagggaaactgaggaatattggcttccactctgcattctttctttcttacatatatttgtgtctacaatgccttaagagaagtctctttgttcttttattactttaagagttccagatacctactgcagcctcttgggaattgatcatttttaggtttgatcactaaagaattttttatctaaatttggggagtattggttttttttttttccaaaatatatatgacccacgtgtttgctttaaacaattttaactataagaaatagaatcactgttatttgtggtttcccctttaaggggatggcttctttaaaaaaaaaatttcagctcaagagacagcagagttgcacttccctagggctggtctacccatctacatggacaattgtctttacttctacatcctctaaagctgaggaagacaggagtggctggcttcacattttcctttattatcaaaatataatcatttattctcctagagcccttgaagttaaatgggggcactggggaggctatccttccgtgaggctgccttaacatcttctcacagcagcagaatgctctctaggactaccatcttcggcggaggggtacacggctgtctttgaatatatgttgcatttattgcagtttagtgtctgtgtccaagttctgctagcaaactcaagagaaacaaacaaagagaaacaaagtttaagtactaacttagaacaagactagttgggaaactcaggacatttaagtaaaacacacattcaacaaaggcgttaagcaagaatagaaaatagaaaatatttacgtaatttcttttctaataagagcttgggggttctaaagaaaatgcatcaatgtagtacagtacttcttcctggggaggtgctaagtagggggagtagggaagcagtttttcttccttgcctgacgtgggactagttctgagtctttttttatataacgttgttggaaaatacaattgccgtgtgtaatattgagaagaactgcctctctaccctcaagacagtgacactaagccatgaggggcctcagggggctatgaagggcgacaccccgctcctttacatcaagtgatagaggaataaaaaagttcccctccacagtagtacaatgggcctctgtccttctctaggagactttaataaagtaactgaatcaaatgaaatttgatcagatgtatacagttcagccttcttgctttgccccttaacaatttatcgaggtgtttctacccatggtcctgttttattaaatgatatttgaagtgttccaccctctgagaaaatgtggtttatatccttggcatacatttacataatctcattaaggagatctctccagcttagttaaactatcccaataaaaaatcttatctttagtagaaaaagactgttttctccaaagggaacaggaagctaatgggggggccaggcacattttgagaagctaaagctgtaattatagttatattttttatgctacgtatgtgaagtttgttaagagagatggatgggaaataattgttgtttggaggatacagtcatgtaagaagagaatgctgtggctaatgtattttaaatgtggttttaaaaataattttttatttgctcccttagaaaatatttctgcattaaaaaaaaaaaaaactaagagtgaaaaattaccagcaatctctcagctccccactggagccatcaaatgaagggttaacctctcagaatccccggaattaatcaggagctcagccaggggccggctgggctagggggaggggattggcagagctcagcctcccccagaggcttacagcactacagtgcagcccactgtggtgcggccactgagagaatgcagaccttttcagagataaaggagcgtgcacaggaaatatgccctgatcccacatcagccaaggcttcctgcttctcatgcactgatcctccattttcaaagagccaaaaggcaacaagttatgttctacagagtaggatttttttaagtacagctttaatcataaatatatgttcatctttctttgctcatttagaaggcagtctgtgatgtgcacctgggtcatctttattaagatctctcaattcattctgctctcctgatggagaggaagctgcagctgggtggatggtatgtcctgccagccactgtcatacagggcactaggagttcttgctgttatgcggattcccaggcccctgtgtcgatttagaaaatctgaacttttggggcaggaacctgggaaccaacattattaataagctctccacgtgattcctgtgcacattcaaatgtaagaaccactaaccccagaggttttttgtttaaaagaaatccctcacatcagcattaggtgttgtaagctttccaattaaagtaaagaacaaaataggttttccctcatgtgccaggcccatttactcattttaataatttgggtgttgaacaaagtgagttgacttcatgtgtaagagtaacaatacccatgttcacatgcatacgtgtacctgaagtctgttttccttcaggactttagtatgtcaaggagaggagataagttaggccttgacttctttccttttcctgtgccttccttatgtataacttcagatctgtccatttcctgaaccaaccttcccttagtctcttcaggattcagaccaagcatcaaactatatgctccaattacatcactcttcccgctcacctcattcccatttaaaacaagtgaaagatcatggagtccctgataattaacactttttatgtaattgtagactttttatgccacaggactggtttctaccagccttcgttcctaactttggctgggattctctccctggaacccactttcacctgctctcttatccatcaccagagctgcccttaagttgagcccacctgaaaccctgacaacctaattcctgctggtcttctatccttaagtgctgaatcttactcccttacttctgtctaatattgaatatccctgatcttacaagaatttggttggacgaactcccaaaaagacccctaccatccacttacttcctgagttgatagccatctccatacatagctgatgacagcattccaggaccacctctcctgttgcatcctccttggccctggaggaggtctgcattgtcaccccctccctggatctcacttccaccttgtgaagtcagcttttccctgttctgccttttctcatccacagttgctaaactcccactgtggcttatgacaaagcctatagttttagttgtaaagtcagtttttagaactaaaatctgagatcctgtaagggaaaggaaatgccattctactctgcttctgcctcccagaaggtctaagggctcctccttcagttatgagccgccttctccatggcgcttgcatctgtggaagagtccctggtttcagctaaggcttgtttttattggtatttgttttttcaggccttgtgcaaggaaagacctaggtggcaagagtgagacagaagcagatctgctagggcagattctccagcctatgaatatggtctaaatcctggaagccccactccctataaatttgcatgaagtagtctacacaaggttgatattctcatgctggttcagattaagttgttatgctgtaggctagatgtttagtttcagaagacccggctaagcccttatctttcggcaggtttcaggccacctcagagcccccgtcacttaaaaataattagctgactctcccacctgagctagtgatttgacgatctgtatgctaaaccagacttctacagaggaaaaaaaaagaaaagggaccagagtgccagaaggaagcttaatttttaaggtaaatttggattcccttaaaggacaagtgaaaaatctctgaagatgctctaaacccagggactcttgtcttttttttttttttttcgtacctgaagcctttttcgttcccctagtcgcctagccctattctatactttacattatatgtgggaaataatgcacagagtacttggcacttccttttgttaaagagaacattttagattactagaactgagatttattcctaaaagaaaggagaatagcttccagatgtatttttccgtcatggactttctttcctcaagtattgacagaggggaggttttatcaaggtctttgtgatgggcctgtttataatgagaggatattagtggagcacatctaagagtgtatcaccaacagaaaactgaaaggagcatatggcaggaacagaaatatacatttgcccaaataatgtggcttgttaacactcccacattcatcctaaactctgcggacatgcatctaacagcatcacacacagtcactccttgcagcagagaagaaaaataaaagtcaaacaatgatttcctcactatgggatgatcaaataatgctaatgtggacatttttatcaaagatgatgggatttcaactcagtaatcttgtgcattctgcttcactgttgctggcatccgggcagtgctgtgtaaggagtttagaaaaatatgagctttagcatttttgtacagctttttgtgataaaacaggaacaatgaaaggaaacatgaggatcgagctcttatgtaacactgagctcaggggcaaagaatcttttagttcagaaagctcttctgaagaatgtctgtagatgagatttaagaccagattaagatgaactttttgaacactgaggcagcttttacccagcattggccagaaccaaagcttatttcaattcaaatatgatctataagatccctactaatgaattattaagctgaatttatcaatttgcagctgtattctgaaactcctgcccccactatggggctgtaaaggaggaggtggggtaatgctacagcacaggaagtgccactccattagacatttggttatagaactccctagagatgagtgagaattgtaggcatcattgcctgattctttgacaccattttatatctgaggaaatcctaccctcaccaagctagaagacttgccaaagttaccagaaccaggactgaaaacagatgttctgtttcccaatacaatgttatttttaccgccccccaccaatattcctttcattttaaagtagattctttttatagtttcatggctcttgacatattagaatctaggcttatatatttgtattcaccatcattttacattcacctacttaactttacaaggaagccatatccattctttgatatgttagcactgggattggtggtggtatggcaagcctggcatttatgttagaatggaattgtggatggagaaaaagggtgcttaagagctttcagaaaagtgctattttttaaacaaaattattctagagcaagaggacctcaatttagagaataacaaaaaacaaaaacataagttgcctgaggcttcagctactcaaagtgggtaaaaatgcctttggcactcttatgtatgttttctcctttggcaattctattgaatttcttggttttaattatcacctccaggaagaaaaaaaaataaccttccagaactataccttcaactatcatcacttaagtgcctaactcttattttcgactatcccctgaacaccttctccaggatcttcccaggctgctcaagtacaaactgttcacagggaaatcatctttgtctccactggttaccatttggttaccatttaccatttagtctattgtcgtcatcgtcctgtgggacaggcacaaaaattatgataccagctcttctcctcaggtcccattgccaatttccattgattgtactgccatctgggccccatctctgtcttttctcctgctgacaccaattgaaatgttcctggatccattcagctgaaagtattttcttcctaccctgaactcctgaagatcttattccaaacctttcttatggaacatgcttgttaattaatcaaacagtatttgttgagcatataatacacatcaggcattatacctaggcactttgcacacattttcattccctccaaccagccctgaaagacttggattttttttttcttttttttttttttttttttttttttgagacaagatcttgctctgtcatccaggctggcgtgcagtggcggaatcacggctcactgcagcatccatctcctaggttcaagcaatcctcaaacctcagcctccaagtagctggggccaaagacatgaaccaatatgcccagctaattttttcattttttgtagagatgggagtctccctatgttgcccaagctggtcttgaactcctgggctcaagcaatcctcctccctgaggctcccaaagcactggggttacaggtgtgagccacaatgcccagcctggaaaactttaaaaatgtctatgaatattgatgccagtgccccaccacctgagatccagatttaacaggtctcaggtacagccgggacagggggacttttcaagacttgctggtttattccaatgtgtagccatggttgagaaccactggtgtaactgcaaacccatttgccagatattctcaggtagttagtatcacctctgaagctttaaaatgcaaacaaatgctggactgtaacccaatcctatcaaattagaactctgggggatagagtctgggaattcacatgttaacaaagcttcgcaagtgactctgtcacataaccaggatcaaaaccccctttcttgatcagatactgaatcatctccctcttatggcaatattagaaataattatagatgtcttcccccaacttacagtctgtaaactctttgaggacagatttacatttgatttaccttggtcagcttcctggcacctagcaaggtccctcatagattatgtgtcttagaaactaaagaaccaggaaaataccttttgttaactttattcagaaaaaaagaactgccaggcacagtaatcccagcactttgggaggccgaggtgggcatatcaattgaggtcaggagttcaggaccagcctggccaacatggtaaaacccagtctctactaaaaatacaaaaattagctgtgcatggtggtgcatgcctgtaatcccagcaactcgggaggctgaggcaggagaactgcttgaacctgggagacggtggttgcagtgagccgagatcacaccaccgcactccagcctggactacagagtgagtaagactccatctcaaaacaaaacaaaacaaaaaatctttgcaacacacttatttttttgtactaggttttaaatctttgatatactaacctggaaacaaagcaagtcatttcaattgtcttagtatcacagttgtgcggctattaagtgccagagctaggatttgaacccaggccatcttgacaatattcttttctgtacatctcaggccttaaaggcaactataaaatgaaaaattcagcgatctacatgtttggatacatgctgtcagacttgtttctgaaatttgaacataacctgtcacctgaggaaaaaaagctctgttggcattatgaaatgaatttggaaaaaaatatgttaatttaaacctaaaaattgtgggatctaacagatatccctttcttctcttcaattccaccctccctcaaacccacacatacacacagacagacaaacacaccctctgattgttctttgacatttcttgacaactatttagttactgctttggtaattttctttgttttctttttagtttatattacttctcaaagatttttcaaataacttgagcttctagttataaatgaaatcttttcaaaagttcatatacagtttacttaataaactggcatctggtggctgggcgctgtggctcatgcttgtaatcccagcactttgggaggccgaggcaggaggatcacgagatcaggagattgagaccatcctggctaacatggtgaaaccccgtctctactaaaaatacaaaaaaattagctgggcatggtggcggggcctgtggtcccagctactcaggaggctgaggcaggagaatggcgtgaacctgggacgcagagcttgcagtgagccgagatcacgccactaaactccagcctgggcgacagagcgagactccatctcaaaaaaaaaaaaattggcatgtggtatctatttctaatgtttcattcaatgtgaatatgcacacaggtataactaagttgaagtgactcttaaacaagacatggaaacatagttccaggcactatttgccatttacaagctaggtgactttggacagggatgagccttctggagcctccttcttcacctgaaaataaaaagggaaaggagcgaagatagaccctcccaaattttcttccaaatgtgaaattttatgatcctttaaaatagtcagtcactaattaggcttttgaaaaacaccaaattaatacttggtccttgtccttactggtcgatatttttaaaggcaaacagagacgtaataataaaatgtgtagaattctttacagtttatagtcaccgttatctccatttcacagaaaaggaaattgagacacagagaggctgcgtgacttgcccgtggtaacggaatcagaaaattgcgagtcgagactcttactggacccaactttgacccccttcaatagactcctactggacccaactttggcccccttcagtaccatgatggccacaggcaaagctggagatcagaggccaggtcaatctgacatgctgacagctccctcccggtagcctgtctgccttccccaaatgttttccaacccagacgcctttaaattgctttggaatagaataccaagtggggatttatttagcatatcatttctggatgtgtgttttcctgagcatttatagatctgtgtttttccaaaaagctgagtgttcctgataaaacaagacagataatgataaatgagcatctatgtaagcctagctgggaggaggaccagcgactgttaacacccctcctgtgaagttaatcccatttcttttagctatttctctattagttaatgaggtcttgcacaaacgtgtgtctgtgatggtgttttagcatccttgcctctaggaacatcttcaaatattcataaagtagctcatctgaccaaagcttaaagcaaaggtgcattaagtatgaatttagtcaacttcaaatgtgggtggtcgaaaagctgctgctgaaataacctaaataatcctccttattggtgcttccagatccacagctgtgggcgccgacgtgaagggtgacagggaaaaggtattagctgaagcagctagaactctgaagggcagccctgtaagctttgatcctgcttcctgactgacagtagtgtgggcccactattggaaaaccaagtaacttaaaagaaacaaaaataaaatggaaaaggaattgccagtggagcccctgggaaggagagcagacgcgagatcatattgttcctgggaggcacgagacctacttcccactccagttccttatagcaaaggaggaaaagcagaatctcaaaagatagcgtggcactcagtgatgcatttggagcggcaaagcacatatggacactcagccactaaactgagctccatggtactgtgaatcatggcagttacctctatgacttggctttggaggattccccacactatagcagagtcgtgggaacacagctagagttgatatgcacatgtgtgcacgcacacccccacccagcccttccttctgcaacctaaggcatagtggcacaaatcctgcctattttttacccttttatgattttgtttccccagagcatcatttgaggaagttgtcgctatggctcttctatgtgcagtttatatgcaaagtttgcttggttccgggtggcctggactattttggccaagaaactgaaaattacagcccaatattttccttcctatttccaggcaaatacctctgagctgccactaagatggttcaagtcttcctgaccctactttagtatgagctccagggacaaatcatgggccaaagtcctctgaccatcaaccccatagggcactgcaataaatcactgtaccactgggaactcagtgctgcataacaggaaatatctatccttgaaagaacccattcatgtcattgccactgagtgttttattcattggagcctttggccttttacaatatcaacccctgaacgaaggagggctcagaaaccacacatctgaaaggagatggccatgtaatcccactcaagtacagacctggagagagacagatgtcgtccattaataagggctaataatgcacatgtttccttttgcagctcagtgctcaacttattggtcattttatttggttatgagttttcccttaatgtgaaaaaaaagtccttaaaaaaatagcaacagcaccataagaatgctgccttgaggaacgcctggaatgtaataatactatttcttttttgtctcttgccacaaggacactgagggcatgccgacagccattatgattacagaagatacaagctaatgttggttgttccagatgtaattttgcatttctcataagaaatgctgttatatctgggatgtaaatttgactggtgtcctgtacttaatgttgttttacaggtgattcacataacaggccggctacgcctgagagtgtcgctgtcccacgggaggaccgtccccagccaaatcatgggtctcgtggttgttgcgcatgccttgcctccccctacgatcaatgaagtcagaattgactgccatatgttcgtcactcgagtaaatatggacctcaatatcatttactgtgaaaataggtactttgtttttgttttcatttgccctgttgcacgttgcacattggtgagggttgtgtttcagccgtctgaaggatggtactctcccagtgaggttcattctaaatcctgatcttgtttttaatggccacttggactgacaccaaacatgctttttatttaaaatttacattgctgccctgatttacgttagggacaacaattaaatgaatcgggatacccagacatccatatgctataaagaaggtccattttggctgagaacccaaggagagagcagggcttagatgccattggcaaaatgatgcagtaaaatgtattgcctgatgcctcatcgggacccacttctgcctaattcgagggcctggcctcatggtggtcagtgttcacacagacgctaagcatggaaagaacaaatgagaatctgaggtccacagaggaaaaaggatgaaaaagaaatttacaaagctattaaataaaactttgtcatcctgaggatttcacttttataaattaaaaaaagatgactcatcatacaaatgagttggcagttcttcctcaagactaagcttttataaaaggactttttagcctctggttaaaaagttcactttttccattaagcacaaagcaagggacaaggaaatgggacattgccccttcagacctttcacctagaagtcagcagccccttatcagactgattggaagaggaaaccatggggtgcagggagggccgtggagaggagccgcccacataccaggtgtgggaaggaagctctggcgatactatccttccccgggtgccacagggagaaatactgcgtcaatttggggaggatgcttttgcagcgctgttgtcaggcttattcactgagccctgcaagtgccttcagaggagaaactgaagatccgaatggtcaagtgacttggggaactgacctctccagagactaaccaagaagatagcccctgcattcagtccactgggaagcgctgaagatgttgagatcgagttggaaactgcctatcatttctgaacaggacctgattcaaaggaaataattcaccctgggaaaagataacccacctgagctatgagtgttcaatagggtggaagatctcatgaacctgttgctgttatttgataagaaactctgaatctgcatttcaaattttgttggcatttattaaaatgtttatgatcgtgacatcgtgggtatgtctgagatattctggaagggccacagaacaccaggaaacatgcgttagccagaatgattcgctggagttggcagttcctaataaagatggctggcgtttactgatcacttactacacatggggcgtgtgcaaagctcatcacctgcacaatttcacttaagctttaggacagtcctgtgaggcaggtgctgctgctgtctccattgcctttgggcaatttcagctaagagagaaacgttgactgtctcatcctcagccaagagattcaaaagcccatgtagttagctacatcctgtggagtctcctggagtctcttctttttcttcagaagtcagactgaatggcaaatgaccagaaagaataacctctgagggggacttttcatacatatgtacccatgaaagaaccaagttacagcccacaaagctatttcttctctaattaaaaatgtagaatgctggagaaggagatccaaccagggaagacagacatcaaatcagaggatggactgtggctttgcttttttgaaaacacacatcagctcccttgatttagctaccagccacctctccctccaaagaacagggcctcgtcttatttaccaaacttccaatgattgtcctatcccaaaacatcacttaattttcattcctgtgatcaactcattaattcttttgacaagctccatggacccgagtgcctcatggtgccactctagtaattgagatcattttctgtgacctgcttttggcgtttttcttcctcttaaaaaaaaaaaaaaaaaaaaaaaaaaaaaaaaaaaaaaaagcttttcacagtcccctttattagccaatacaatacagcattatttcccatctacagatgatagtaattatgaaaaatacctgtatgaaaggtaattgcatatttgatctgaggaaaagcatattgtgtgccaggcactatgctgtgttaatttcattccattcattcatcccctcaccaaccttttggattattttacagaagaagaaactgagtctcagagtaaaaggtgccatcaggattctgatcctggtgtaggtcatccaactggtctggtgcttttgagatatgtgttaagagaccctcaaatgccgggctagtcgcattcaccacagtaacaggctctggtacagagaagggcttggatcgttttttaaggatttaattcaagaaaagaataaactaaagaaatgccttccctaaagaatggagtggctttttcctggggtttattatttaattagggaattgttaactagaaactaagccttgctccttgactctgcagaccattcttctctgcattcccaaggacggcctcaggcaaagccgacatctaatgctttcagaggagctggcaaatttcagaaacaccagtgagggagggtcttttaatgacatccttgttccctcatttgcagaaagggggtttaactgtgcttggaagatagctaatggttttaagaaaacaccgactaatctgtgtcatacctgaaacccatgaaatccttagaaaaccctcctttttatttccccagttaatcttatcttacctaaaatcctagtttggccaaaaatattatttgaattgctagacactgagaaattcactcgatgggtaatatattttaattatgtttctttttttgtttgtttttctttcttatttccctgccttgggggccagaaaactctccaacaatgatcacatgtgtttcttaaatgtgtcatttctaaagatttacttcatatttcaatagaccatatgccgtaagtcataaaaaaaaaaaacacatgaagagtaaagagaataaattaaacaaaaaatatattccactttggactgaccaaaaggaatctgcacttggtaatacagagggtaacaagcattttgacatgtttgtgtaaaccaggcggattcccccaacacggtttccaatttgggctctatttttccatgctctgcctgaggacatcgacgtctggacagtcagtgacagaggcttttacacacacgtactgtcgagcacaagcctggaagagctgctgaaatggtttaaaagtttttgtgtggaatccaccacaaagtaccagttaaaagggccaggagtgaaagccgagctcccaaatgactaagactaaaaaagataatacccccaggcatctgtatgtctcagcatttaaattatatcccttgaaatgccaatttggactttgtgccaagaagctgctgaagccctttttcatggaaatacccaatagaagaccaatctgtttaaatgaaaggtgtctctaatcatttggtataaacataacatgtttttattttattatgtaaccttgaattatcttggcctgtaatgaggatcttgcattgttactgattctcaataatttcatgaaattatgttgtctaaatgtgcattcttaatgccaaagaaagagaaaaacctatctaattgttgaaacacaatcgcttgatctaacgcatttcctacttttgaaaaaagactgttacgtgttaaagaaataatcttatgtataaagggtttccctcacagtgccacctcctcacgggtacagtagtataatgaaatgtgtcagtagaactgtttctaagttatttgacagtttctttatatttcctcctttctgaattccagcctgtgttcttctctttgtaggattagtgattatatggatctgacccctgtagatatcgtagggaagagatgctaccacttcatccatgctgaagacgtggagggcatcaggcacagtcacttggactgtaagtacctcctgtgtgggggaataaccccggctggtgtcagcaatctctgaggcttgtttggtttcagtgctgatttttcccttcatctttcctgtgtacatttcagatgactgtcagtgtgcagtgagaaaaagtgagacataaatcatttcaacgcgtgttagaattagattgaaagttggacctcaggcctagagaaattgctggatctttaggcactcacccagaattctgtggtgtcttttgctgtctctcctataaagtggtggggaaacctttgtcttaagtgctaccttgaccctttcattttctggagaacaacttccactctgaaatttgtggtctcagtttcaaagtacacatgggagaagacaagttcaaataagccagagccttataaaaatgcctatttgaccagccacaaaactggggtgaggggaagccagggagatggggcagagcacgttctttagagaaaatgttgtgtggacacagcagctctcgaagacagtgctttcgctgtttctggaaagagagttattcagaagagtaggtatctccatcccccaactcctggggaacagaaacttatctcagctctttgaatatggctcccagcccctgagccacaggctgaactccaaaagaccttctgtgcatgtgagcaaagcaggagcatcagtggtgtggctggctccagcaacacaccagcagaaccatgcaggaccccgcatccaaccgccctggctgttcgcactgtccatggaaggggtctgactagagcactgatctggtggccctcttctgaccagaggtcctttatatgaccattcaggagattcttcctgaagatgagtctcccctaccccctatccatgtccctggaagcttctaaccccagttcagacctctgaatttaaatacagtcacatgccacttagccatgttttggtcaactacctaccacatatatgatggtggtcccatgagattgtaatactgcatttttactgtaccttttctgtgtttagatatacaaatacttaccactgtgttacagttgcctaccagtattcagtagagtaacatgctgtacagcttttggtctaggagcattagcctataccatatagcccaagtgtgtagtaggctacaccatctaggtttatgtaagtgcactctgtggtatccacacaatgatgaaataccctagtgatgcatttcttagaatgtatccccatcattaaacaacacacggctgtacatgcaaggtgccacaaatgagatggtacagcctaaagttgaagcatttatacagaaaaagccagccaagtggcctttgtatttacctcctctcccctttcttatcttggtcaaagagagctatttcttatctttcctgccctttgcaattatttcttcatttcgaactcagaaacatggagatgttgagctagccagcacctcaaagtatgaacatcctgtactgtgtttttaaccctgcgttagcaacactgacatggaaccaagttcagtgtcagaatctgtatataccacgtctctggaaagagcctgcctgcaagacagcagattctactcccaacacggagtgtgtgtgtcttgatattgcacaccagggatttagggaacacacttgttgctgagaatgaatgggtgttgtgtatcgtagaagcagatggctcttcaattaattggggaaaaaaatgatgtggtttcctgaaaagaaacatcaggttctttgttgctcagagtttagagaaaatggagaaaaaaatcaggatctttggaagaagccatggatatatttttggaataatacaggctagagatccagacttcacaaatgaatatattgttttgaggacactgtcatagaccatgtgtgcagagggagatgccttctcattttggaatcttaattaaggtctaaattcagaaacctgaggctgacaaaaaaaaaagaactttgtcttcctcagttattatttggaaaacatcatgcatcatgctatctctctgggatttgatttacagcttgaagaaacacaattcctcaggaacagtgagcgagggcagttcatttctccccattaagcaaaggtctccaacaaatatgtttgatgcctttctttccgatttacttttatctcattttccgtacccagaataatttgagagtgctgaaaataaaccactccaccattcactattgtgctattctcctaatttttctggtatcttgccaactaataaacagagaaggtatgctttcaaattctgatttttttcattacttgatattgacataccggctattgctttatgattcagcctactaacaatgattgggttcattcttttaactcatacacatgacttctaattttgagttcttttaataaccttaaacacatgaaaaacaaatagaatgagctgataattctgcatagtaaaatacacttcacatatttagctatcatgctgtggaataactccacaatgtcaagtagcacacaattagtaaaactgtagggggaggaaaaagagtgttttgatcctgaagaagtttgatcctaatcagattgaaatttcagcgttcttgtagtgcttaatatcttcaatcacacacacaaaaaaatcaaactgattccagtgtcaggttttgcattctgtgactgaaataaaatgctaaaatatacaaatgcatctcgctttgtacaataaacattaacatcattataaagtaagattgagtctaaaattgtgtgatggaatgtctgatgtttacctaattctcaaaccaaagccagcccagtaacaaaatgacagaccatgtaataagtcttggttgtgtaaacactggaagaaaaggcaaaaagccagcacagcatcttgcttttccaaagccctaggctattactgaaggatgcctcaactgtgccttcttggcaggagaaggtcatggcgacatagaatcaggtcaagaataagatagaattctaaaacaaagggatggttaaaaaataaaccacattaactatttagtttttcttcctagagctattggcacaattcctggttctgtcctgaaagataggttgtagtcatctggtaatatttctgattttttaatatctgtcttatgccccagtttgataaagcgtttttttaaaagacttaatagtctttgataactaaaaatactatctttatcacttatatcttttttccttgcctaggcatctgtaaatccataaatgaacttgtctctagaataagaaaagtaaagaggaatatcagctgtgccaggattacaactctgataaattgaaccaagaactttagagcatctactcttccactaagttaacatgagatgactgatagttcactggatttcaacagaaagaatcagtaagaatcacattattgacgccaacatggtatgttagtgaaactacactggaactctaaagcctagggagttctagggccccttctttcacactgtgaccaaagacgtctgtgatttctttcatttaaaaccaatttcaccaattattcaggtcaaatcaacatttaaaggttagaattttaaaccattcacattagtaattattggggcatcttcacctcttcctccctccagttctccattgctcaggaggtactggcttgggagatgatcactcacagcttcccacagttacacactccagttacttatggtgtctgtgtggctcttcaattatgagacgtttcagtgcaaccatctaccactctacttctgcctgtagccccccaaaaatggagtgctaaaccaaacagagatgcatgctttgcactgctctttattcccatttaatccagccctttgtctagagaaggagctgaatttgtctcgagatatccctagggttctttgtgggtccaatcagcaacaactttctaaaaccttaaagagtggcctaggggaaaacttcctttctctttatgatgttctgctccaccagggaggctcaaggctctggagctgtgggatttcagagaaaaggagccagagactgtaggtgtggtggcagttttttccttcctagcacctgacccagtctcagaaaactctggaagagttatttcagaaagacagaaggacttcagattgcctttgagatcacatgcagttaaaaagcatggcctatccaacatacttgggggttgtttttttttaaaaaaaagaaaaaaacagtagcttaagtgtttatttcttaattacaaacttctatactttctaacaaaactaatatacagctacctgatataatgcattccatgctgttttgcatcaataacccctacacttccctcctgaaggcgtctcatcgccaaatgcaagcagactgcttaatgcgggactaattagtatatccccttccagtctgcaggccctccattgtaattccttcccagctcatttttttccacaaccgagcatcaatcaaagtaagtgccctgcctgcctaggcaacacaagatgtcctccatgcatttgtcatctgccacacaaacaaagggggaatttaattgttggtttgggtatgcagccactgcacacagaaacggaagctgcaagtgaaggaaagagaaaaggtggaaagtttgatgggtgggccaaatgcagatagcacgggggacttttttctgttttctgatctcagcctttcttcaggggtgggtcttcagggatttagctgcaacctggtcattggctggactcttcccagagcaagtaagtgttccccttctgccatatgaatatgaaaattcccatgaaaggaaatgcatgtaatagctaccatgtctgactttcttcagaagccaagtcagccttcatcgtgtgcctggccattaaccgaaaaaaccgtcacaaggaggcaagataaaggcaggtttttatgcagggatgaatttgtattattttgtcttagttttttgggggggtggtgtgggggggcgggtaccggcagggagacagtgcttgttttggcttttcaagtccatgggcaggcaagcacggagtcagagaccagcaagagggttgagctccagcggcgcatccctgctgcgcttactacactgtgcatcagtggggcagtggtgtcagcaccccctgggaactcagagacgcacattttaaggccttccccaatcagaatctgcagttagcaagatccccagctgactcgtattcatgtgaaagcttgaaaagtacagaccatactagtctttagacggcactattttacacgacgtaaacagtaaatacaaactgagtatctgaagggttttcttttcctctcaaattggatgaattctgagaacagtagcaaaaggtgagtagtgaaataactctcagggtactcgatcagtattccaatgaaacaagaataggattaagaagctgacttctttacaaagatataaagttttaaatatcaacaggaaaaatttaacagagtatacatagtactaatatccaacctagtaagcaaaagatcttaccgtttttttcccttgggcgaatactttcctgtgtacttgactgtatgagtgaatatgagcagtcgtttttttcctattcaagtttatctaacatttgtgagcacttactaatgcaaagcctgtgtcattgctgtgaggtttcaaaagcaactaaggtatggtgtccaccttcgaggagcttacatactaatagagaaggcagcatgaaacagccaattctgaatagctagtatgaaatgaggtctgttaagatgtgcagacaaaacacagaaaccccagaggtgaaagcaactaaggggaggatggagaaaaagccccaggggaggcagattttccctggactttgaaagaggatggcaagagagatggaggagtggtctaaggcattgcaggcttagaagagcataggagagacatagaacacaaacacatgatcttttctgtctccccagagagcaagccagaactttgatttgactgacaaattctaataaaattctcacatggattcgcaagcttctcattattatttcaattagtagctgcttttattttttattgttatttttatttatttatttatttatttattttttttttttttttttttttgagacagagtttcactcttgttgcccaggctggagtacaatggcacgatctcggctcaccacaacctccgcctcccgagttcaagcaattctcctgcctcagcctcccgagtagctgggattacaggcatgcgccaccacgcccggctaattttgtatttttagtagggacggagtttctccatgttggtcaggctggtctcgagctcccaacctcaggtgatccacctacctgggcctcccaacgggctgggattacaggcatgagccactgcgcccagcctagtagctgcttttatagtttttttaaaaccttgtattcaacaaaaaataacccattgctcttataaggcacgatcagaagaagaaaacaaaatcaatacttctggccgggcatggtggctcatgcttgtaatcccagcactttgggaggccaaggcgggtggatcacaaggtcaggagttcgagaccagcctggccaacacagtgaaaccccatctctactaaaaaatacaaaaattagctgggcatggtggcaggtgcctgtaatcccagctactcaggaggctgagacaggagaatggtgtgaacccgggaggtggagcttgcagtgagccaagatcatgccactgcactccagcctgggtgacagagtgagactccatctcaaaaaaaaaaaaaaaaaaaaatcaatacttctgagtcatccattttcacctaaatcagttaacctaaataaaatcaattccattacttcttataatggcatcgtgttctcaatcttatacaaactattttttaaattgtttcctgaaaacattcaatgatacctcacatatctcaaaaaacatcaaactttttttaacttaaatgagtggcataggatttaattcatgtatgtgtctaacatgcaacagttttcccatacatgcagggttaactaaagatcaggtcattcaaatctcttcatgaactcccacatcttctctggcttcctagaacttttggtggggcatatcgactagaatgcacctggttacaagtaacagaaaatcccagtaaaaatgacttaactttctcttcatgatcaaaagacttgatcaaaagatcaagatagcatccccatcatcagttcctcatagggcaatgtccaaagtgcggaaggggtcagtcgatgttttgtgttcattttggagctcacagaaaacatttccagaagcacttccccaccaccccacagcagggagaagcctcttgtgtctcatagtcccgtgtgtcgagtgaccaagcctaagccactcactggcaagcgggtagaattactgtatctggcttaaacaatcgaggtttattctcctgggatttaggaggaggccatcaaacataaaacccaaaatcagacttttgttatccagaaggaagtggcagaatagctgttgagcagacgaccaacaatgactgctacatggaagaatctatgttttcacaataaagtacttggatttctaaaaatctacataacagatgaacaaatggaatttgtctgggatcctggaaatgtttctgactttctgaaacactagtttttacatacctgtgcctcactactcatgtatttctttttaaagatgtttgtttagtggagttaacaaaatgattgcctccagaagcacagggtccaccagagacaaaataaatctgagtataaggtccacatcatcccttttgtctgttttcacttctgcctatgccctaatcagattaactgcttcagtacttgataacacttaattgttaaagggaggtgaagaatgcacccagcccaagtcagacgccctttgcgctttcatagacctacataccacctgccatacagttgtcactgttgtaaacttattagtgaaaatgactgataagcatctctttctcattcaaaggcaagtagaggtaaatccctctttccagagtgaataaactttttcaacaacctctcacagtagagacttccacttgagtttcattgcccagtgtctcatcatattccaaacctaaaacaatccctgactaggggaatgcaattatcaagactgatggagactaacgtaggacaggcctgtgacacattttgcacactctgatatcccccagtgactagcacagagtaggcactcaaaaaaaatggattgaatgaataaatccaccattgtcctcagttcctagccttaatttttttaattccatgttgaggagttcaccgcttctcatttatataacaaattccccccccaaaagagaaggtataggtcctaaaaaaaatactctatccttaactattttgggttgagaagggaatgaatgagtgggactgaaactccctggtcagactgaaaacagctcgtaaaatactgtgatctcagatgtccctcatgccaacaattattttgattctccttgtcctagaacactaacagtgtttaaaagccttgttctccaattcagtacattatcatgaagaaaaggggaatttattttttaagcttaacaaattgacgcattctaaatcaatgaaaagttttctgcatgattcaatattaacagtcaataaaaatctatcaattggcagtgtataggaaaaaacctcccctgaggttgtaaatcacacagatagcaattcaagcagggcctgtcattagcgtattaggggggaaaatccatcgatgatgcatactcattcacaaaacatctacaggtcttctgtccttaagctcataactcacagtaagtatcaaatatccttcaattctaccaaatattgctcagcatatagatttacaaaaaaaaaaaaaaaaacctaaaaaccaatttctggatgcctgctatttaagacatctagctcactaattgcaaaatctatagaaaagtctgcacagcatcaaagcctcggttgatcctatgagcagttctaaatgaaaaactgtctcttttgcgagtaaataaagcacttaatgcagtttctggctataattgtgtttctcctgtgggttttgaaaatgaccttcctgtaagcctcaaggactgtaactttttagataaggaaacttgttcttgttttaagtctatgtcaggttcattcccctatagcccagttttcaaaagccaaagaaaaagtaatccagaattaaaaagaaaaaaaaggaaagaaagaaaaaggaagaaagaaagtcctgtttccagaatgaagttccctgtcagcctgccttgggccttaggtggagaagcagagattaaagagtcagtattctttttcatgtttcatctgccagttttgtgaatgtagaaagggaaccggtggctacagctaagcacccaactgtggtattaagtagaaagtgtgattctagcacacccccctcacttacacacacagatacacactctagtgaattcaaaaataatttttgagtctgtagcagaaggcacctgctctccgttctccgcggccactgacgaaggtacctccaggagggggtgaatggcgccacagatgcgtcctcctatcgccatgacgataatgaagctctttgttcggctgtgtgaatgtgaagggtggaatctccgatgatctcaccatttcctatttattctatacttacctgaatgcaccatgtcttgcagctttttaatgcatatgcaaaccactaaaatgtccttttgtgagacactttgctaaaagaccgcttttgatatgtgttcttcatctcctcttcaaactgaattagactgcttccttcttcttatgacacaactaactcactatttagaatctttggctttgattttgtagaacagcccaacaggaagagaccacgttctctttttttctccatatttctgaaggcaaacttgtactgatttgttttgatttactaccagaattatgttcctgccacagacactggcttcctttatgtcctttcagtcgtcagtctgtgtctgtggacaaagttttcccaaggaaaactgaaatccctctgttggtaactgtgtgcagggccacggatgtgtacctcaggaaaaagttcatcagatttgcagggagaagaattattctaagcagtacatttcttataggccaaccactaagctcaaaccaagagaccaggtgacattttaaaaagatattcaataaaacttagcatccagtcttggtgggggtggggggcgggcaggggaaacctgtgtttgatgtaaaaggtcacatgttctgaaatgtaagcactccacaattttcttttgattgaactgtatttgcagcttccttcacagttagaggtacgtggtattaatattttgacttcaacagccaaagacacacttactcatggtattgtaattgttagctaagcaaagctgaaacagttcaaccaggaggatttaaatctctcccagttcatctctatagtattcttctcacaagtggaaggtcacctctgtcctctgaagagcacagcttataactctaaagctcctataacttggagggtgggatggtgccaacaagagcctcctggttttccttcgagcaacaacagccaaaagcaactggttacaccctgggcttcagaggagcaaggaacatgttcttgtgtgctagcagagatgttcccagttacgtctgggacctttcaagattctaagctaacctatgcaagtgtatttatcctctctatgtcttcaggtttactttgtcaaatctaagaagaggtcatttaaaagttttgggatcctcaaactaaaagtaattactagagtacaactttttttttttttttttttttttgagacggagtctcgctctgtcgcccaggctggagtgcagtggcgggatctcggctcactgcaagctccgcctcccgggttcacgccattctcctgcctcagcctcccaagtagctgggactacaggcgcccgccaccacgcccggctaattttttgtattttttagtagagacagggtttcaccgttttagccgggatggtctcgatctcctgacctcgtgatccgcccgcctcggcctcccaaagtgctgggattacaggcgtgagccaccgcgcccggcctagagtacaactttaaagacataattctagagatgctttgacacgatcagtgaattcagcgagagacacacaggttgctcagcccaaaaattttggagagtagaaagtaaactttggaataaaccaaagaaaagatgccaggttacatgttagaggtacctagaccatatgacaaggatgtgatattcaaattagaatctctccttctagttcctctccctctgttcctttccctttgtagtttgtagacatggttatgactttactcctaagctcattgtgtgatgagtatctatctcttttcaagggacaattaactctttttaaggactttcatatcaagtaactcacgtggtgcttatttttgttattcccgcaaaaggaattttatgaaataaacttattcaaatattctctcctttctcactgcttaaacctaaaacttgaaaataaaaaacaacagccactggattgaagagaatcaaaaaagttttttctgtgtttttcaagttctctaatttattacacactaaaaatcctttcaaactggcaccaaggtggcttttcttcttgagctgattaggaccacatgagttcaggaaaagctgtcagatcctgcctctggcgcagctggaatgatccaactgatttgccagtatgactttttttttttttttccaaggaaagaagcttcatcccaaagtcataaatttacattctggaggcccaagcaaaaggtatttctttttcattttttaaagaagctaaattccattatgatttcttttttctttttttgagccagagtctcgctttgtcacccaggctggagttcagtggtgcaatctcagctcaccgcaacctccgcctcccaggctcaagcgatttttgtgcctcagcctccctcacagctgggattacaagtgcacaccaccacacctggctcatttttggatttttagtagaggcagcgtctcaccatgttggccaggctagtctcgaactcctggcctcaagtgatccatccaccttggcctcccaaacattatgatttcttttacaagatctgttgcaaaccaaaagcaacttgggtgattttttggtaaacatgttgtcccaactctgcaccgtatctgtagttatctagattcccactggcgcttgggggtctcattcagaaaacaccaatccctaggagagaccaagtgagattgcctaccctttaggaattctgcctgtcagactggcccagggtaaaaccacaggtcagtcaaactcgtcctcttcagccgcccacggtgggctcccgaacctgctttgtggtattcaccacaggaagtcaagggctatcacgtggctccccgactccccaaggaagccgtgagccattcccttccccttcagtctttttacagatacctcctcacatcagaagtcacctgtcctgcccctctcatatttagctctcctctcttgctagctgacccttggcctgggtgataaagaaagctgtattattatattcatgggccctaacaaacgagtgctggatttatcttctcaggaaacacagatccatttaggtagacccagagtcatcctactgtaattcaaaaagatgacaccatacggtcccttagcaaagaagcctttcagcccccttcgctacacatacgtgcagaccactggggaggccaaacgtttggctggatgtctatttccaaattgggattttattaagagaaagtattatcaggaaggagggggtgatctttacattgattctgcagattctaatttgatattataactcctttatccctttgccccttttgtatactttgtaaagtggagataattctttttaaaattttgcctgcttttggtcaaattctagtctagaactcccaggcaggctgtgctgatctggcctgccatctcaatgtattcttcatgtgattctaaaaaggggcttcttagtctctttgcctttgttaaacatactagaaccatttggaattattcctcattccagacacaaagcagacagaattatacccccaaccactgattggggtgctgtaagttttctctgtgaaaatagtggacagaattatataacccatcgttcctctgttaatagttaaccaggttgagaggatttgaataaaagcacatcttgttgcatgcaacaatggtttgacagaagagctgtatggcagagttagtattttactgctttcagcttcaccacgcagttttgtagcctgggaagccatgcatgcagaatggcagaacttacaattgcctacaaaaggagagtacaatgcaacctgtggagccacgccaccaagagaaggtgacagttccgggccttcaaaacaccctaaactggtgaggagtttcagaatgaaacttgttatgatttgaaacactcatcaaagtgaggctttttcaagtaacagttaagacataattaccaaattttacaacggtcccgttagtgtgctgtgagaaaaaaaaggagaatggaagaaaaccttccaagtttatatgtttatggatgtaatagatggatgtggcactttcagagccaggaagagtggctcaggacaagatgagaagagcttccacagccttaaacacagcccttttccaaagtgacttcccttcacacccatccacccccctccaaaaaaaaaaaaaaaaaaaatctaaatgtacttcatgaaactgttgtatatgaagcacttattagccgtaattaaatggacaatatgaatttactacgtctttaggactctggcttgttctggtttagagcaagatgattaatgcaaatacatattacttgagataaccatttagcagctaatttagccaaatttattacagcagttagaggtttttcatttcagcagacggaggcaaggacatgccaaaagtgggcgacgtagatgagtgcacactgccctctagtggccagccagccggtgagctttcgcggggcgccgagttgctgcgatccgcagccaagtaataacagcaggttttccacatttccggcacccttttaaaccattcccatccacagcactttatttcaggggatgatttactgtgctttccccttttactagctcaggagtacccagatacaaatcaaatcaatttcaacttggcgagattttggttcaagtatcatttttaacatctgcattttaaagctctctttcagtgggtatttaatggcaccgtttcacattactgattgtttttacttgctccttcatttggggccatatttcagagtctgtgtggagctgtcactctgtttggctccagccaagtcaattctgtgcctcccttaggccagtgtttctctctgactccactggggaatttattttgttccaacattcagcgaagtctcaccagaatctcccccgactgaccagtgtaaatttagttcatcggaggactataaattctgttagacaagatcaaaaggaacagacatataaggacgcgggttgagattgctcacacggaggagaaacgatcaaagacgaggggtaaagcatctttggaaccattcaaatatccagaatctcaaagaggtctacctccaagctatgaataaatcacatacaaatttgcctttcttaccatctgatgtcaaatccattgacaatatccacaccgcattaggtgttctgtgagccaaagagatttgtagtccttttattcttttcacaccatggctgcccaaaacggaataaagtcttgctacaaatgccagtaaccctggctccagagctgccgctccactgaattgatttcatttgtcctactaatggcattctatattaagcatacagagggtcaccctggcttggtgtaggtcctcccatttttaggcttaaggttttgcagagataaaaaaaaaaaaaaagttatttgatcccagtcttaatacaatgcctctgttttgttttttttcgccagtgctgaataagggtcagtgtgtgacaaagtactatcgctggatgcagaagaacggaggatatatttggatacagtccagtgccaccatagctattaatgccaagaatgcaaatgaaaagaatatcatctgggtgaattaccttcttaggtatattttctacttcttttctatttctgtcctggttataaaatatgccatataaaatatggctatggttaatagccgacatgttgtgaatattatcttttgacagtacctggtgtggaatttcatggcaattctgctgttctttccacaagattcaaataaatgtgagaagatcaaactatgttggaagggacttgcaggaaagatttcaagattttcaatcattcttggtctgtcaacatttgggcatctctgcagaagttgctttggttttcccacaaatgcttaggccagaataatacagacttcagcctacagctgaagcattcaaaaagcatctcctcttccccagcacacacacactcacacactccagttcttgtggaaatgaagtaaaacagagcgggagaaaagtggcagggaacattatattcctcttatatttcttccctttgatgcccttagcatattacatagggtttgacttcctgggcattaaagtttcggtaaacaaagtgagttgctttgccggaatcaaacaatagcggtgtaaaaaatgaaggcaatttttttttttttttggcccactgctttgtgatctttggcaagctttactgctcttaaaatgtgtccttaacagtctatctgcaagtgagcccaagctcaactgcttcctaaattctggtgtgagacaccatttctctccccttcccagtctacattctgcctttggattcaaactagcagaaaagtaaccaagacccacagattgggccatcttgagtttgggggcaggctttctgggaagttctccaccaatcctgcacttggcctggctccctcccacccccatcattctggtctttggcttctcctggcctaaagccaccaagcagagcccacacgtggtctgagtaggaaaatttccaataggtcttgggaatggaagttggtgccctttggctgataatttagacagggagtacctgaatcccatttttctttgagacagccaagtggagctgggaagctaacaaccatggctcatcagcacactggcccttcagagtgtgttcacatactttggtgatgacttgaaggcatgaatgtgcttgctaccaacagcatatcaatcagacactaatgattattgctctagagagggccttaatgtgcaccacttaaaagagtcttcatttatctactttctatttccttttttttgacctcttctgctctacattaattctctctaaaggtaaaagtatgtgtattgagtgtggctttctccaaggcctgatttccgtgcaaagtctcccccgtgtttgtgatgtgttcaagatgagttctgatatcaaggaatccttgtacatagagttttatggaataattactatagggaatgcaggtggttataaaaactcacatgccagacagaaaatggaataaggtcttgtggcactgacattcttttgctaggcaaaatgatattgtgacaaggagacccatcaccagtaagaattaaacgctggaaacaggcaccctagggctagcagtgtctggctcccatgttgatgaaacatagatactgaagtcatctatgtagttgttactcccattctctgagatttcttcctatctggatctttcttactgcctcatcagcctcatgacttcctcctctgcccacaaatgcaaggagtaagaagagctaagcaatcagtctctgaataccattgatctagcctaggatccgatggtacaaactcatgagctttggtgattctattccatcaaatcccatatggataggaaggaagtttaggtatcaaagaccagtcttcaacctcaaaagcttcaatctcaggcatagaagacctgttttagctgacctaaaaacactccctgaagtcaatgataaaggactgtaaattgtagggcaagtgatctgtgagcccccaaagaagactaaggtagatgggctttagcaggggaaactccaccaagacagccatttactggtatcacctctatagggtaaagatctagtaagaaaatgatgtggccctggcaatatagcaactacagaagtttggttttctttcccacattcttgtctattattcttccctgagcaatactttcacatcacttcttcctgcccagaacccttgcacccaggccccaatccaggcttgtccttccctgttctgaaactactgctcctccagtcttcttcccattccctcgtgatacttaacagaattatagactcagagtattcagagacagagtccaccttcccaccattagtctcatctgattatctagagaaagctttgctgctgaagctaattcacacgaaggagtaaatgcctgataatccattttagtgaattacccctcccaggaacatttgcagttttagagtagttactgaaacagtgactctttactataggaatttcgctagagattagcaaatgagtcagtaatcatcaattttaagtctctgcttggctagccatcatggaaaaatcgaagaggcatttcccattttgaagcaggaggatttccttgtgccttcagattacaggagcctactctcctcatccatcaggtggccttggagtggcatttccagaagacaggtcaaactgactcaacatgctctctcttccaaaagagccttgtttccaaactaaaaatagaacaaaaattaagcacatttgtgcaagtgaggttagatcccttctgttagggcctctttcacactgggactctccccactgcaatcagatttccagctaacaagccacaggtgtacaccacacgagcagatgaaaatgtgattgtaatgggtgtgttgacagtttggtagccataatccatgcatcccaaggtgcacctgtgcatctgtcagataggcaccaaaggctctgctgccccaccaatagcgtgggagccatctgagcggctgagaagctacatcaagggcccaaaacaaaggtactgaggccatggactcattaggagcccaagagaagacacgacacaccaggagacatgggaatgaattgttgagagtacttctcatcctcccttcccccaggtgtactgtcaagcagcacagtttcctgacccccagtggtacctgattatttaaaagcttctctccatggctttcagggatttgggtattcgatcattgcagcagggtgcacctgtgccttggcacatgcaagccaagcttccataaaatcccatgaagagctgagaaatgatttcatgtttagtctttgaaactttctaaactccagaagtctgggacaaagaagtgggggagaagatggtccaaacaaaccatgcagaatgggtgtctgcactcctgaccagtgcctcccttccacagcaatcctgagtacaaggacacacccatggacatcgcacagctcccccatctgccggagaaaacttccgaatcctcggagacatccgactctgagtcagactctaaagacacctcaggtattacaggtattattccttcttttccatgttcttcagtgaagcttgcccaccacgcgcagggggtgggcaacagccagagggccatcatcagaggcaaagcaactggtcacatttcagagagacatatgtcacatcaagttattactgagtgtctgcctctctccagacacacatatatataattgtacaccactacatacctgtatgtactatataggtatatatacacacaatacatatagatatgtagtgctggataaatacatctgtgtgtgtgtatatatatacatatatatatatatatgtttttgtgtgtatatatactcacagaacaaagagatcttttgagatctgacagatctctttctttaaatatacagaaagagattgattgctattagcaatcacttaatgtcaatccactggccatacagaaggagccctgctctaacctcatagctagctctcggcctctactaaaggcaggtactagggccagctccaagagagtctgtgactttgagccccaaatattcacattcccaccaagctgggactgagcctctaaagtagggtacttaatggcatcgatcaatgcctctttcagggtgctggactgttacttatttcctgaatctatgcagaacaaacgcatgcattttcatttcctttggggaagcggacttcctgagtagttctttgggacactgaaaattagtataaaaatttgcttttcatcccatccccagccctcttccagagacacacataaggccagggagcactaaacttgtaggatttttacagctgcaagaaaatcctacacctcttttaaccctacctcttctgctacagaaggggaggcaatgaccacaacttctagtccaggctgccagtcaggcttcttccctccatgttcagacgctgtgttactggaaaaatctgttctttcaaaaatgtggcagctaggttttcctgacaacccccttcttgagggcacctgtgctccagcattgtaaacatgtatcccttcctccagacccagcttcagggaggcggaaggagggcagagcactcaaggcagatcttcattgtcctcctctccctaaattgcattaatttgaaagttcttgacaaagacataaaaagttctagaattggtagtctctgcccctttttaatacagtgcatagttgtgaacaaaacaaaggaaaattcctagcccattgagcttatatactagtgggaagaagagacaagtaaataaaactaaaatatacagtgaggtggcagggtggctcatgcctgtaatcccagcactttgggaggctgaggtgggcgcattgcttgagtccaggagtttgagagcagcctgggcaacgtggcaagaccctgtctctacaaaaaaaaaaaaaaaaaatcagccacgtgtggtggtgggcacctctggtcttagccactcgggaggctgaggcagaaggatcgtttgagccggggagggcaaggttgcagtgagcagtgaccaccctgctgcactccagcctgagggacagagggagaccctgccaaaaataataataataaataataaaaataaagatatacagtgaatcagatggtggtaagtgctgtgggggagaataacttatggaatagaaaggagagtggctctcagtaatgaacaaatattcaccaagggaaaatgcagactctttagaaagtcaccttgcatgccatcatttttctgtgtcacaccttaatccaggttatttaacctgacttcctgagtatctttgtgggacttcttaaacttgaatgtgcctgagaatcacctgggggtcatattccaacgcagaatctgattcagtctacctgggtgggagcagagagtctgcatttgcagcgggtgtccagatgattgccaatgctgctggcccgcactttgagtaaccatccagctaacccaggccctcagcagagagaaagcccaggtcttaagtcctctgaaggtgatggagaagcccgtgatgaggacggacacttgccctgctccccgccccagcccctgcaggtgacaggctgggtcgccccgctaacctggtgtcttctctctcttctctctccgcccccgccaccgccggccccccgccccacacagaggacaacgagaactccaagtccgacgagaaggggaaccagtccgagaacagcgaagacccggagcccgaccggaagaagtcgggcaacgcgtgtgacaacgacatgaactgcaacgacgacggccacagctccagtaacccggacagccgcgacagcgacgacagcttcgagcactcggactttgagaaccccaaggcgggcgaggacggcttcggtgctctgggcgcgatgcagatcaaggtggagcgctacgtggagagcgagtcggacctgcggctgcagaactgcgagtcactcacgtccgacagcgccaaggactcggacagcgcaggcgaggcgggcgcgcaggcctccagcaagcaccagaagcgcaagaaaaggcggaaacggcaaaagggcggcagcgccagccgccggcgcctgtccagcgcgtcgagcccaggcggcctggacgcgggcctggtggagcccccgcggctgctgtcctcccccaacagtgcctcggtgctcaagatcaagacggagatctcagaacccatcaatttcgacaatgacagcagcatctggaactacccgcccaaccgggagatctccaggaacgagtccccctacagcatgaccaagccccccagctctgagcacttcccgtccccgcagggcggcggcggtgggggtggcggtggcggggggctgcacgtggccattcccgactcggtcctcaccccgcccggcgccgacggcgcggccgcccgcaagactcagttcggcgcctcggccaccgcggccctggcccccgtcgcctccgacccgctgtcacccccgctctcggcgtccccgcgggacaagcaccccgggaacggcggcgggggcgggggcgggggcggcggcgcggggggcggcggccccagcgcgtccaactccttgctgtacactggggacctggaggcgctgcagaggttgcaggcgggcaacgtcgtgctcccgctggtgcacagggtgaccgggaccctggccgccaccagcacggccgcgcagagggtctacaccacgggcaccatccgctacgcgcccgccgaggtgaccctggccatgcagagcaacctgctgcccaacgcgcacgctgttaacttcgtggacgttaacagccccggctttggcctcgaccccaagacgcccatggagatgctctaccaccacgtgcaccggctcaacatgtcaggaccgttcggcggcgcagtgagcgcagctagcctgacgcagatgcccgccggcaacgtgttcaccacggccgagggactcttctccacgctgcccttccccgtctacagcaacggcatccacgcggcacagactctggagcgcaaggaggactgaggcgccgcccgtcctgggcccggccaggccccgcttggaggaggcatcgtcggcattttcgtttagacctttaattctagcactttgaattcgagcaggtcagcgtcttctctcgccacgacggtccccattccaccccctctttctttcacctgacttattctttcgtgtaaagatatgtttattttttgccttcagagggtcagacgaccagttgcctgccgttttgtcttcttctaaggtgtgtgttgggttgttttgctttcctttgcatctttattaagatgtctttcatgtgtatatgcctctgccatagaatactcagtcttgtggtcaagagagttctcaagtgacaaccattggggtttcttcataaagatcttgatatgatcaagatggaaagagacaagcataaacaatgtgccctgtttgactaagtcaaatgaaatagggtggtttttgtttctgttcctaattcctttaaaaaatagggggaatagtattttagaattttatgcagaatttaattctctttttacggttaagattttaagattttcttacttgcacataaaaataatttgggttcttaaacttaatttctggcctgtgactagaatgtttaaaaaaaaaaaagtcggactaaatgttaattactgaaacattaacttaatttctaaaaccatggtgctatcatttattaatctgtaatgtcttcatacaaaatgcagctcctgggctgggttttgggggaaaaaaaaaaaatgtgttctgtcctggtctggagtccgttgctgcagtctccttggttagttaagacaaagccctcattaacgtttgctgcaggacttaaaattttttacctcccaactaacaaacatagcctcacattaaatttaatgggtcagtaaagccccttttaaaggggctgctggaaaactcaatcaaactgatttgaggagcagtttaggtacatactgccttttgtttagctttttgttttccttactcagtctaactgaggctaattttgcaacttcaataacacttcggagtaaaagaaggaaaatatttaacatgtttttggtttttttcatttcttgcttaaaacaaaaaggaaggttgtatttggggggactggtttgatttgatggaatttctttccctttggttcttatttctgggttgaaaccaataagttttaaaactaaagaatgggttaataagcttcagacagataactgcaactgaaaactgcacattaagtaaaaaaaaaaaaaaagaaaaaaaaaagaaaaagaaaaagaaaaaaaatcctattttgtctttgttgccagaaatcagtgtggtgtcaaacactccaaatgactgtcaagtataaattcttcttccacttcatttttggcagctgtttgttaaggcatctaataacagatgtgagaactgtaatgtgtacaatgtgtatgtgtccttggctgtcagtcccattgcagtttcaatgtgtgtttctatatgcagtatatactaagctaatgtagttgttttgtcctttgtcttatctgtgctctatctctagtccggagtggtacagtcccattcctgcagtcctagtgaatcagtgattcttgggggttagtgggttttgtgtggtggccttcctctgtaatgtcaccctatgctgcttctactgtctgtgaatcttccgttttaccttttaaaattcctgctgttgctttgctggtgtatattctccctacctctcctctctttccctccctttcccatctccccctctccctcctcttcattccttccccatccccaaaatctctttcattctcagagataaaaagactcttaactagctcaaggttaatggagccatttttcccacaacggaattctgggtatgactctgtcttctggagtgcaacacaaagcactgaagaataatgctcagatatattaaataaattgatgccatatagcctcagttgttaacattcccagagtcccttgtgctctacctataagcagtgggtgcttttctttggtttcctttcaggttggctgatggagcaatatataaagcaattaccagtgagacagaaaattctttcaaaggtcaaccaacatttttaagaaacaaaatgggaggggataatggaatctagaattgtcatatatatttgtttacttgtgcaatgctaatatagtaactcggctgtcctttgaatatcactgtgttgagtagattcctctaggacctttgatttcatgagttgggcccaaaccgtggtggaataataacaaaaagaagttaaatgccacaaattttaatagtgagcttacttgaaggatttaagtaggtttaggaggtgaagaaggccgatggagaaatttacagattaattttggaagctctactctagctatcgaacaatcaaaggaatgcacctatcagctacaaagaacagctagacagctgttttttttcttttataaatgtttctgtgttgtgtcaaaatgatttctggtgatttaaactaacagataatcacagctgctgtctaaattcatagtgttgaaaattacaaaatgaaaaaaaaaaaaaaaacacttcattacctgtgaagactgtgtctgtgtttttaactatttcttgtacaaatatatgaaaacttttatgaggagactggtgccaagtagctgaataatggggaaagggatattctgttcgtaaaaatcttagcagtgttaccaactctacgatatatatataaaaaaataattaaaacgttacaaagcgacagctatggtacatttgttttgtgtgaagctaaccggacctaacttcctgagtgcctggcttattttgaaacattttttttcattgaccattgataatgctgcaaatcagaaatgtacatacttcatttacaacagggttctttttatacttttgtagattctcatacatgtcacatacatggttgtctttatgtaacttaattttttcatccgcaggtgccattttcataataaacttctcttggatttgttactatctggcatcatttcttttacatgtaaccatcctgactaatgaatgctggtagtatttgtttaagcaggtaccttggtcattattctttatttaaaaaaaaaagaaaaagtaaaaaaaatgcattcatatttttgctagttttggaaaaaatatatagcttgtgtactgatgaggctgacaaggcacataataagatgctaatccaaatactacaccaaacttgcaaccatcctaaattttcagctaccccaattcattgtcatactgagcattattatgcacattatcaaagctgaacaatgggcctgcaacattaaccactatgggaagtgtgtattttttgattaatgcacagtaagtgatgacagttttcatacattaatcatttaaaatgcactcaatattttcatttattacaatctataatgtataaccaactgttccattgcttatatcttctttttatactaaatatgcattttctttctccagacaagctgattaagtcatgttcatgctgcattatggttagggtagcatgtggcctgttacgttttaaggcaggtcagctgcttactctttaaaaaaaaaacaaagtgtcacccattgtctcaaagttaaggataaggtaggtcaactcttaagtctgtgatctccaaaaactggaatatgaatgggctgagctgggggagttggggaggggaggcaaacactttcgtccagaagctactaaaaataataaatatcatttccctagtttaagtcttcagtgacgttagccaatgtgggggttgtttttttattgatggaagaaagcttcagactggtgaacatagaagcgtggttagggctgaagagctctggatttctctactgtgccctagatgggtcttcagaataagtacttaaaatagggaatagggagaggctaattgagaacacagaattgggtgtgccgaaccacttttctaaaatttcttccccttttgctctttagagtcagaaggatatagtatagcaagattgagaagtcaaaaactgaggtagctggagactatgctgagtggattatggtgagtgatgaagccagcttacccaagccaccctgtctagtaggtcttgatggaactggttgtgagtgcaggctttcagagctttgcatggggcagggtcccacaaggcagaggggtgcttgtctgagtgtgggactggctaatgctgttgatcagccataacactttgcttctggacattcctgcagccttgtgagctggaggtggtagcaatgagggttgaaatgggaagcaggacaggtgatgggtgaattgaaatcctcacagtatttggtgcttctgcagtagaagtggtggaaatcctggattcttatccaaactcaagcctctcttagcatcagcaagttccctgtcctttatgtgtatccatcaatgctaaaataggtcactaatgaaataaagaacatctttcagctagaaagagtgagtgagctctgggctcagactcattgataatcaggaagccctgccacctcctcagccccagtgctggcaaccagaccagagccctgagctccccagaagtacaggacttcgttgccaggctggcagcaagtcaactggtcaaggctctagtctccaggtgacagaacaggggccaacagccagctctctgtagctcctcccttcttcctcccagctgatacttaaactaatttatttggcaatgaggaacaagacaatttttaaataaaaacagcaggcgggacaagagggaacatatacattcagttgagcacaaaaaactggttttaaggctgggtgcggcggcttatgcctgtaatcccagcactttgggaggccgaagcgggcagatcacgaggtcaggagttcaagaccagcctggccaacatggtgaaaccccctctctactaaaaatacaaaaattagcccagcatggtggcgggcacccataatcccagctagttggctgaggcaagagaatcacttgaactcgggaggcagaggttgccatgagccgagatcgtgccattgcactccagctctgggtgacagagcaagactccgtcttggaaaaaatgataaaaataaaaataaataaattggttttagcccttgtggactacaattcttacccgtccttctcctactcctagacaaagtctatttaacattgagaacgtttaaagtaatttgaaaatcaacttgccctatgtattatatttaagagaggcgataatatatctcaagcccagaagacagtctgttcaagccaagattattatccaggttcaaaaagtagaaagggtcaaagatttgggagagaaggaagaatatctttgccaacattccatatcatgtagtgggaaaaaaaggcaaacctaattcttgagcataattcccaaagatgtatgtcaactagcaggcttaaactctctgggacactaaggtaaatgagtaccgttggctgccttctgctttctgtgtctcctaggaaaccattatgaagaaagagggctgatttggtaagttccccacaggcataaatcattgcttattcatcttcatatccttccatagtgcctagctcaatgatttacagtagtgttggcttggtaaagatctgctgaatactgatggatgaagatgtgaacaaatgaaacatgacttgtcaagaggcagagattccactggaaatgtccatgtggtttgacaggatagcttgagcttgtatcaagaaaagattgtcaaaatggataaagcagcaagttcattcattcttcctttcttgagtagtccatatggctgacacagagttggccatccataaatgttggaggtgggtgggtgtgtccataatacgatctactctgtatacagcaacagattaggtaaagcaaacagaggaggaggaggaaacaacccaaacagttggtaactgactcagttaactatgacattgtgtcctatggatagctaagcaaatagattcacaagaaagcaccacttaatagtgtatcctcacgtatgagcattgagctatataatcacaatagtgatccagagaatcttagcaactaagaggaactctctggtgtagaaatcgcatgtccttaataattctagcgctgagggtctttctagcacactgtcgaattgtcctaatttttagaaggtgttgagctgaaatcttacctctggagttaaagggactaaatctaaacccttttccatttgagtggccttcaaagatatgaagatggatgtcagggtttcagtaaatctctaggctaaatcccacaggttttgtccatttctgccagtgacatggtggcaggatccttcaccatcctagtcaccattatttgagtgcaccagaatctgccaagacccctgtattggtttcctgggtctgctttattagcacaaactgggtggcttaaaacaacagaaatgtattctctcacagttctggaggccagaagtctgaaatcaaggtgccagcaaggttggttcttctggaaagctctgagggagggtctgttccatgttctctcctagctcctggcaatctttgacattcctcagcttatagatgtgtccctctgatctctgcctctgtcactttatggccatcttctcactgtgtgtgtctgtgtcttcacatggagttctccccgactgtgtcactctctcctcttataaggatattaatcagattagattaagggcccaccctactccagcatgacctgatcttaactacctacatctacaacaactctaccataagaaggaaatgaaagtaggccgggcgcagtggctaacgcctataatctcagcactttgggagactgaggtgagcagatcatttgagttcaggagttcaagaccagcctggccaacatggtgaaaccccgtctccactaaaaattgaaaaaaaaaattagccagccatggtggtgcatgcctttaatcctagctaccagggaggctgaggaaggagaattgcttgaacctgagaggccgaggttgcagagagccaagactgtgtcactgcactccagtctgggtgacagagtgagactccacctcaaaaaaaaagaaaaaggaaatgaaagtaaggtcaaatgctgggtactctcatgttaagaaactgggggttaggacttcaacttttggtggggcacaattcagctcataacagctcctattcaaatatggcaccttgggccagtcacgtgactccagacatgatctgatacttgcgtggcacagaagttccatcctatctcttcctcaagactctgagctcctaggtaaaactgcctgcaattgcagtcacatcttagcagccaggtcaaattactatctcatcttaagcctccagtcaaccagcctcagtcttttcaccaatttttgtgaaagtaggtctcccatcttcctctgtgtacatagccctcacataatgctggcatgggcttgggtgaaaagcaacttagagaaagcagctcatgggcatgaaaggggagcaagaacctgaacccctgaaaacacatttctcattttcattgcattttacataccctctgagactacttcacacaactctgctggaaaggagagacctggctccaatatttgtggaaccctggggtacaggcacataataaatataataaatccataacaaacattactggtggactaccctcttataagtaaactaaggcagagaaaaccaaccatatgaaggaaatggaaagaattagagatagcaactaccatatcagccattttatgggagcagaactggtgtgagaggtgccaagactcctgatacagacgtgtaaaacccactcaaaagtcaagaaagaatttcaagataaaattcttcaattttctgaaaataagtgggcctcccttattcccttttatggaccaaaatcaaagagcctaggccaaatgtattcactgagtatatgttccatctggaattaaaactcataatccctaaattcccagctactgtcccatgcacagttgtcttcattcttctgtccacctctgcctgtttggaaatcacgggatataccacaaggaatgacccagataatgtgtctatgttaaaaagaatttttctgggaaaataaaattaatttcagcctttaaaaataatttatgcatactattaaaactactttaaaaaagaaaaaggagcagagagtaaggaggtggcacttccttgcactgaaggagttctcagatttatagcggaagtgtcagaaacaggatgtaatatccatatgacccccccacctcccccaaacaaaaccattatacccttgatgaattattgacttgagagttttatctgtgccatgaataatcacaaacttgggagtctcagggcacagttcataaacaaataattatatcacaatgataatttttcaggaattgcaacatcaatcatggccatgttattatcaagcacattttctggttgcctctattcatcaaaccctcctccctctccacccttccacatcacacaagcaaaactcatcaccagattgcctcttatttacacatcactcaaagcaggacagagcaggcacacacaaaatgggccaacccagtgtttacgagagctgagttttcattaaggaaattcaaattaaacacattgagaaagatggaggtggggggagataattaattattccagactcccccaaagaagccatctttgaaaagatctcatttagaagataaaaacaaacagaagttttattccatttcaggcagtactaataaagaaaaaggagttcgtctcagaaagccaaggaaatgacagcactacagttatgtgccactgttttcttttcacggtgctcacacacacacaaagctcgggtgctgtctgcagcctccatctgcaggtgaaagaggcaggtggaggtgggtacagaacctgggaagagtataaatacttgatctaagtctctatacaaatcagtcatacagctggccagaatgcttaggtctgacctaaaccacttttctgtgactgaaacagaaggctaatatttccaaacaagtaacagtacaaaaagcactcttagtcaagctactttactgagtggtttaatgtcacttaaggtcatagggctaccccttggataacatgttcatcctacaattcaaaagaaaaataaatgactagcaaagcaacataaagaaagtaccctctttagataaaagattgtgcaatcgggttaaatccgtaacacagcggggcttgccatgaactccttacacaagcgagctctctcaccggtctctgtttcctcattggcaagctctacaggcaaagcaatgtgagtttaaaatgacggataggaagaatatttagactcctcaaaaggaggtaccaactccaagcatctgagacaatctagtcccctggtaacagctcaggactgttgaggacagcccttgaacccatatggcttcaatttagatcaaattctctcttccttggcatcaaaacatgtctaggcaaaggtagggccaagtgtcacgcagtgggcaccacaggtatgggaacttaggggagctagacccagcctgatcagccccaaacaaccaccactccatcaacctgcaggacagctggaggttccaagtacactgtactactttatccaaaacactatcttccctctctaccgctcttattttaaaatctttgagtttcctgcatgtgcctggactatggtaagcccccttgccttaggccgacaatggtttttgtttttgtattttgtggggtttttttggttttttttttgtttgtttgtttttgttttttgtttttttgagatggagtttcactctgtcatccaggctggagtgcagtggtatgatctcggctcactgcaacctttgcctcccgggttcaagcgattctcctgcctcagcctcccaagtagctgggattacaggcatgcaccaccacgcccagctaatttttgtatttttcatagaaaaggggttttgccctgttggccaggctggtctcaaactcctgacctcaggtgatctgcccacctcagccttccaaagtactgggataataggcgtgagccagtacacccagcctaggccaatctgaatatttaatcttattatccaacaccactggaaatgagaaataaaaaataaatataaagttggccaggtgcggtggcttatgcctgtaatcccggcactttgggaggctgaggtgggtggatcacctgaggtcaggaattcgagaccagcctgaccagcatggtaaaaccccgtctctactaaaaatacaaaaattagctgggcgtggtggtgtgcacctgtaatcccagctactcgggaggctgaggcaggataagcacttgaacccaggaggcggaggttatagtgagctgagatcgcgccactgcactccagcctgggccacagagtgagactctgtctcaataaataaataaacttattaaaaggagggaaagtagagtcagggcagaaagacacacacaagtagaccgtggcccagtaaaacttctagatatccccttcaaagcatctatctccccctaatacaatattatcttcagaagccagccaaatatcttccctcctcccttctccctgcctacagagaggctgcctctccagtgggtgtggccctccctctgtctggccttttgcctccctcctgcaccatgagagctcctctggggtctgtctccctttttctcctgtggggcggctggacctctcttgcctactcccaacctcctcttcacctgtcacccctctcagtgtgatgaggccctcagctggccaataaaccaaagaccctttcagaaaatctactctttttagaaatctggggagaaaatgatgtaaatttttaaaatttcaatttttggaccatgttaaagcatcaaaaaagtacacataaaccaacaatgtaacttcctttccaatcccaaatcctctggtggaactgctgagagccctgcaatgaacttgcctagacccccgcccatcccctccctggtggggaactcccttctgacagagggaagttgggcagtttggagataagaggagagagtaaagaaggtcacgtaagccctaagttgataacctgctccagggaaagcgacagccgtccaccatggccagagtcctcccggtctcacccgagaggccagggtccccacacgcctagagttcacacacctcaacagacacctctgcatcagagtcacatgggaaaataaaagatttataatcatttaaaagatgtttttccaaaatacaaatgtaactgctacttctttcatagtattttctaggacaagaacaccagcaattctttttcattttgaacattttgagtaaaaggaagctcagatttctttctctagtttttccacctgacttccctccatgctgctccggatatttacatagagttgtccaagttagagacatttttcagacattgattaatctataattctttgaagtagggaaacattattatctccactttacagatgtggaaactaagacacagaggttaatgacttgcccagaggtcaaacatccagtcaattgcaaacgtgggtttcaaatagaagctcctctttctgctcttagcttaattcaagtttgttcttagctcatctgccctatttacatcacagctgcctcccatgtctggccacttcttaaattttgccttaaggcccttaatgtgcttcttgaaagaggaatgcttgctttgcctactgtcagcagttgccctcttcctattcgtgcctttgcttgtaaataagaaatgacaactcctttctggagtattttgtaatactaaatagtactttgtataaatagtattttgcatcactaaatagtactattattttcttaattttttattaacaaatagaagcccgacagttctttctaaacctagaatctgtaattttgcttaatttctggtagtggcctgtaattaatttaagtgaggagctacccaagccacaccagaaatataaagatggataaagtactaccctctgtgctctagttcttcacagagtagaaagggagacagatgtcaaaattaatcattacaatggtatgacaagtggcatgacagacatatatatacacccagtgttatgggtggcctgagtaatggcaacgaattcaggccatgagggcagagaagcttcccaaaaggaggggatgcttaaagtgggacttgaaaaacaagtaggagttaaccacagatgctagagaaagaatgattcctggaaggtataagcaacatcatagaggcaggagagaacttgcaagtaattcagtgtgctggagtgatggctacacctaggagatatagggagaggtcagctgacaagttcatgaaacccagtgtatgctttgctagccagccccacccctaattcagggctgcatcctcctaacaaaacgattaccttactctcacgtaaaggcgtgtgccactcaccaagccctccttccacatttgctgggctgcatctgttcaggggggtcatctttttctcattcatacaaagaagccacaaaaaacagcagccctgtgagtggcctaccttgaatgttacatgtggagtttgaatggtacttctaggcaatgggatgatcaatttattcagagaagtaaaacaatgcagtttttgtactggaaaggccactctgatggcatttgaaggatgagccagattaaatatagacaggagtgatatcccacgtggcaaaggatgagagttgagcaggagtagagcaggtagaggggtggatttgagagggttatgggagaagtgacagtgactggttggatatggagagagatgatggagaggaaagagtaaaagatgactcaggtttctggcttgggtgtgtgggtgtcattgaacaagacaggcagagaacacaggagcaaaggaagatttaagggatgagtaggaggagttgaagagctccattttagacatggtaagttttaagtgctcatagaaaatgcaggaaatgtccggtgagtaggtggaaaaatagttctagatctctggagagaaactggttttaaaggtagcatcagaaacatcagcattcataggagaagccatgggtctagatgacattacacaggagagatggtgtcgatgagtaaacggccaagaatggggtgctagcatgtgtcaaaggagtggtcagaggaataagcccatgacagaaatgtttaaaagaggccagaagaatgaaagggattggtgttacagaaatcagttaagaaaaatgtttccagaaggccaggtaaggactgaagtattaaatggacatggtgaacaaagacagcataagatggctatcccttccagaaatttggcagtgaaggaaataaaagggccatatttctaagaagcaacttctttttgtcactgattggtatgatctttctttgaaaaactgtagtccctgcatcactcatattaaatggctaccgaacaagagggcttggaggcaaagtcttgcccttgcagaatctatcttgtcaccttcctatgtgcctcacgttggtttgtcccacagcctaggctctggccccagcactgcattcagaggagacactatgcatgcattaaggtcaggcatgtaagatgttgtgcctgtttcaaggactttctgtactctcaatttctccccagagaaatgaattgactttgtttggtatgacctctctgatcatccacagaggctcttgtgtgatattctatatatttaaaaagaaacttctaggaaagagaaagtaataaagtgtatgactggggctttattcaatggagaaagaataaggttggtcccaaacctgtatcagactagcgttgaactgtgtggaatcattgaccctagttaagccactatagccatgccaacaaaattgttggttgactacctgatatccttttgttttttctccttggtaatggaacccaaaacttttcttagctaggcacagcgctgcttagaataaaatattttgttttttagcctctcttgcagctgaatatagccacatgacaaagttctagcccatgaaatcttaacacagaatgaaaatttccaagcaagctgatacactgtctttccttcttattctaggctgcaactcagacataatggctggagttccagcagccatactggatcatgaaatgaccttaaaaataaaagccatgagctaggataggggagcagagcttagttctgggggcattactctagccatgaactacctacttctgaaccacttttatatgaaactgaataaacttctatcttgtttaagccatgtcattttgggaagagggatttactttgctactgaatttaattcttaactgatataactattagattagatcaattataaatatcctttggctgttcatcactaaaccaagttccctagttctttcttagagtttgtcttttgacctgcattgctccttacatattccagcacatggataggaaagcatgagaggtcaaatgtgggaaaagctagaagcttcaacattgtatgaaggatgcaaagaggtctttaaactctagcaaacggttgacaagtgatgattctagctaactccacatatccaacaagaaagaatcccacagaaacaaagaagtacttcacagcctaaaaagaaccaattctggctgcacagacaatacgtagaagttctatatcccatttgttgcaaggagatatcttctgtgaaaccacatatctcagaagtatcatctgaactgttcttaaacaccaggcactctcacagttcaaagaaaaggttgaaaaaaaaaaaactctagagtaaacttggagaatgaattaggcaatgcttcatttgctctccgttacagggagaaggttcatgcgcacactgatacctggcagggatggaactggaaaacccttatggaagctgaactaataatgagaatctaaaatgatgctactaagcagctaccagttacctagagacccacacactcctagctgggtgctttaaatattgcctaatgtgaggaactaaaaattctgaggacaactccaaaaaaaccaatcaggccatgacaagatcacaagatcatcacagccaccatttaccatatgccaagcactatagtaagcactttacattcacttgctcattgcatgccaataatggtagaaactattgttatcactatcttaaggtctagaaactgagaatccaagaagttggatgacttatccacagtctcttaactaataattggtggagccagaataataacccaagcctccctggtttcaaagcttgattgattttgtaaccactatgctatgggttcctccccaccttgatgttgaagagagaattattcctgaaagtcatcacacctattttttaatactttataaaatagagatttttaagaccaaaaaaagttcactgaaaataaaaggattgcttcataataaaatgtttgactcatcagaaatttattaaaaatcacgtttgtattcccatgtaacagtctaaaaatgtacaatgctaaattcaaaactgcaagttcaaatctacaatcatgttggaagatttaaacatacctctctcctagtcatcaggcagaagcaaatataaatcccccttgagcacataatatatatcagagcatcacattatctcttcaattttaaatactccagggaacattcaatcaaaattagccattcatatgggtacgcaagataacaatgtgactgaaaatcaaaagaaacaacaaacaataaaaataaacctaaacaaaatccaaagaatggaattatcaaatatggaccgtaacaataatcagtgtttgagaagtgaacagtcaatattgaaaattaagagaaatgttcaaattataaaagaactgaatggaaaaattctgtagccaaagttttataactgaacttaaaaactcaaacaatggatttaacagaaaattagattatttgagaattcctattagtaaacaggtagacaatatccagagtaaagtaccaagagatggaagtctagaaaaacacaggaaagaacatataggttatatgggataggatgaaagggcctagcctacatgtcattgtccaaggagagacaaaaaagaatgaatcagaagaaaaatgtgaggagataatgactaagaattttccaaaactgtttaaagccttcaaagttgcagattcaaacccaagtacaatgaattaaaatacatgcatggacatcacataggtatttgtagtaaaactgccaaaaaccaaagacaaagaaaaaaccatgtgagcaaacagaggggaaatacagacttatttctttcaaaaaacagtaataagaccaaaagctaacttaccagtagaaaccagaaaaaccagaaaagaataatatctcttcaaaggattaaaaaataagtctacaaatctagaagtctatatccagtaaaaaaaaaacacaacggaagtaaaatacagatattttcagatgcaaaacaaaatttatcactgggaaactgtactaaagaaacactaaaagattctttaaaaagagaaatgaccccagatggaaactaagaactacagtatgtaattaaaaacaaagcaaagagcaaagatgttaataaatttaaataaatcttgattccatgaagcaataataataatatcttgtggggctaagaatatagagaaaactaaagcacaccagcatataccataagttaggatgaggataaatggagttaacgtggtccaagtttctagcactgtcaggaaaatgaaatgttagtaagaatccacagagtatgcctcacttcatggaacaattctattccttggaaaaggtgccaatatagcaaatttgtttttgttattaaatgctattataatatcatggctatgagctcttacgaagtcttaaccataaacctcaaaaaataattacatctagtgataaaaagaacatatttagattaaatgtagggaaaaaagctttttaaagaatattccaaatgaatcctcacaaaaaaatactacatattagactatgagtcaagaaagacagacaataataacagctctctaactttgtgacctgccttttgtcccttaacctctctggggtccacctgacttaactgcagagtgaggtaagtttgcaggtgacctccaaaatgagaggttctcctatctgacctcagcctagcagccagctagagtcactgacatgccccattcttcatggctggtccacagagcatgctgtattcttgccactgttgggtcagtctgtgactgtgaatgacagagtctcctgctcaccaagagcctgtagcgtgtatacaaatctgttgtgcttgttatcataacaatgtatttaatattacataaatactcaactatgagagcgaaagaagattgtcgtttctatgagaactagagtgagtgttttgtaaagatgattacacagagacttgcttcagaaatttgatgttgatgactataaaacattgaagggaaagtatctcttcagattgtgtcagagatctttaaatttgtacttctctttaaataaaccaaagtttggacaatgaagacaatatttgggggcgtcatttatgcaagaaagatgatgcaggactataaatagtagacgtgcactttaaaaagcctagaatctacatcaagtctatgtaaatgagtacatttaggtgtcttaatttaatacaaaatgttctaggtgcatatgcattgggttttgacggctagtttttaaacacattctatgctttatccaactttttaattaaactgtcttgatcttgttagataacaagttttcttctgtaatttcataattaggatcccatttataagaattgaacacagtggtttcaagccaggcacggtggctcatgcctgtaatcccagcattttgggagcctgaggcaggtggattgcctgaggtcaggagttttgagaccagcctggccaacatggtgaaaccctgcctctactaaaaatacaaaaattagccaggcgtggtggcacacacctgtggtcctagctacttgggaagctaaggcaggaggattgcttgaatccaggaaggggaggttgtagtgagctgagatcgtgccactgcactccagtctgggtgcagagcaaaactgtctcaaaaaaaaaaaaaaaaaaaaaagagaaaagaattaaacacagtggtcttaacaggcacccagcttctataaaatctccttggcatcctgaaatggttcaaatgttgattcttcaacccctgcttgtgtgctttttaatcacattatcagacttttcaaaagaacaggtcaatctgagacaagtaagaccacaacaaggacaagcatttgaaatgcccgtgccaatgaataggaaagcactttaatctttggtcctctccaaaaattccatgtcccatgctcgtcctgttatttcatagtcacctttcgcttctactaatggcctcagtacctttagattggataggaaacttagtagaaacaactttacccatcaaatggtgagacatagatccacaaaattaaaagtgatctttgaggccattgcaagaaactgcctcagtttccccatgctactcttcctgtcccaaaacagtgaagtagagacaaatgagatccacaaaaagtttttcataaattttcttgaggtattttaaatgttatctggtactaacacattttaacacagatgaattaaccaaatacatagctgtgtttgatgtagaaataaataaaggatgcaagatggaaatagaatcagagttttctagcagacggcgggctcactcttgtcaatgtcctgaggcaatcagacacaaatactgactcacactaactataatgtacagaaggcctgaggaaggcatcagggtggcaatatattaatttaaagtgagaaatagaattgtcacacagactggaattattcaggttggcataataatctccttttctccctgtagtcagggaaaaccaaatggtaatcagaagccactcattatcatgagaaatcactgtgaaaagactcagaaatatttaaaatctgtgtattttctgcattctctgtctccaggagcagaacttcactggaaccagaaaactgctgcgaggacacagaatcagcaaaaggggagtcagatgaagctcctgttttcacatcaggtgcacaacaggaacactcttgcctttgggactggaatttctggaaatgtgttggtgaattctcccactccaagggacagagctcgtatgggattttcaaaacaggggtcttgggtgattctccttttttctatgcttcccacagctcactaagccctctgctttggatgtttcatttctttaaatatgttaatgcaattatacatgcattgaaaattacagtcggccgggcgcggtggctcacgcctgtaatcccagcactttgggaggccgaggcgggtggatcatgaggtcaggagatcgagaccatcctggctaacaaggtgaaaccccgtctctactaaaaaaaaaatacaaaaaattagccgggcgcggtggcgggcgcctgtagtcccagctactggggaggctgaggcaggagaatggcgttgaacccgggaagcggagcttgcagtgagccgagattgcgccactgcagtccgcagtccagcctgggcgacagagcgagactccgtctcaaaaaaaaaaaaaaaaaaaaaaaaaaaaaaaagaaaattacagtcttgcaaggctggacaccagtcttcatctgcatgacaaaactttggtctccacaacctcctatcttaacccagacattgctttccattgataataactctttcaaccaattggcaatcagaacatttttaaatctacctagaacctagaaccccactcctgcctcttcgtgtcccacccttctggaccaaacctgtgtatattttcatggtatttaattgaagcctcatgtctccctgaaatgtataaaatcaagctttgtccaaaccaccctacgtacatgttctcaggggctcctgagggccgtgtcatgggccatggtcactcatatttggctcaggataaatttcttcaagtattttacgtagtttgattcttttcatcaacagagttcagaactacttgtccaatgcttactgaagaactatggactatgatccctacaaggagaactacaaagctcaaagaaatcagagatgacacaaactaatgggaaaacattccatgctcatggataggaagaatcaatctttttctatgtagtattataagcacctaattatata

SEQ ID NO: 5686 - DNA, 92223 bp, Homo sapiens
  ADAMTS7 gene - 76838606 - 76890828 of chr15; NCBI Entrez Gene ID: 11173; Build 35; sequence includes 20,000 bases upstream of initiation codon and 20,000 bases downstream of termination codon of the gene
agatgctggcatacatgttgagcacggtgagcgtcagcatcaccttgcagatggcacccccgaagggccagctaaagtcgcgcgccgtgtccacggcccaaaagggcagcgttagcacaaactgcaggtcagtggctgccagattgaggaggaagcaattgagcagccagtggcggcgccactgctgggacctcacccggactagcaccagccgttgcccaccaggcctacagcgcacagggcccagtaggcgcccgcaatcagagcccgcagcgccggcgcccggacggcccccgccaccccgtccaggccatgcaggctgcggggactccgggccgggctagtgttctctgatccgttgcccagggagctgttagggagcagcccccgacgcctcttccggccagctgaagggaagcacggcccagacagctcgggcgattcgaccctgcctctggcggatgccatcgccgttgatggcgatgcagggatccgctcagatccactccaacaccggcagccgctgggagagaactagggggtctgcagtgcctcgcggcagcacctttaaaaaactggggaaccacctgctagcctgcgattggccagctgcacccgtggcccaccccaaaggcctccgagctgttatttccagtagctgcttcttcacccttgaattagcgttgaactggggaccctttgcgggtgaactgagacgcgggggccggaagcccgaaccggaggaaacagcgtctgcaattcacccaaggtgtgggtccgcagctgccggttcccgcccgaggacgcagctccagcttcccagtgcctcccagagggactctgatactcggggggcgctgaagggaggtcatataaattcttcccgtggaggcagtgcgcccctccacctcccctgtgggccccgagatagccaactgaagaccaaggaggggtgcccaagtccgaccagtggggcctggcagccccctgcccgccagccctgcttccttgaacccctgctcctgataaggcatttctcctcccctgctttagccatgggtacccttcattcccaccttcactgtggtctgctctgcaagtatccctgatcttcttcccaaggtcagccgcactgcttacaactgggctgaagacggagaagcaactaatctaggagcagtcagaggaagagacatgcaaacagggtttaaaagaccagtgctgggccaggcccaaaggctgatgcctgtaatcctagcactttggggggccaaggctgcagatcacctgaggtcaggaatttgagaccagcctggccaacatggtaaaaccccgtctctacctaaaatacaaaaattagctgggcatggtggtgtgcgcctgtaatcccagctacttgggaggctgaggcaggagaatcgcttgaatctgggaggcggaggttgcagtgagccgagatggcaggcctttccactccagcctgggtgacagagcaagactccatctcaagaaaaaaaaaaagtccagtgttgggagactaagactgggccagcactcatgctcagcatgcacagaggaggggcctaaagcctggggaatcctgaaagacttcttggaggaggtgatttttgagctgatcccaatcctgccttggcttccaattccagtgacttcctcctacagttagaataaaatccagatttcctgctttggactacaaggcctcatgacagaggcacccactacagcttttttttttttttttgacacagagtcttgctctgttgcccaggctggagtgcagtggcatgatctcggctcactgcaacctccgcctcctgggttcaagtgatccttctgcctcagcctcccgagtagctgggactacaggcgtgcgtcaccacacccagctaatttttgtttttaggagagatggggtttcattttgttggccagactggtcttgaattcctgacctcagctgatccacccacttcggcctcccaaagtgctgggtttacaggtgtgaggcaccgtgcccagccagccctggtatttttaaaagtgcctaggcaatcccactgtatgccagggttgacaagtcctctgtctgtggtctctctgcccacctcctagaccttgtcacctaccactccgagccttgctcacttcactccagacacacaggcccttccccaaatacaccactctggcctgcctcaggcctttgtctttgctgttccctctgccaagaatgcccttcacccagattaccatgtggctgctccttctcagcactctggcctcagcccaaatatcacttcctaagaaaagacttccctctgccaccactctgtttacttccaaaagcattcattgcatgcccattatgtgccaaccaccttgctaagcacgcaggatgcagcctgcagtgtgtcttctactgggggataaagacaaacaaataaatgagatgaactcatgggggaaagagtgacaatgaaacaaagcagggtaacaagacagagactgaagggcagggcaggagactcaaggaaggggtatgagtttagggatgggagggttcccaggggaggaggagaccatggtcccctttataccacttaccaggtatgtgtcttggggataaccagtttttatttttcatattttattttatttttgagatggagtcttgctctgtcacccaggatggagtgcagtggcgggatctcagctcattgcaatctctgcctcccaggttcaagcaattctcatgcctcagcctcccaagtagctgggattacacgtgcctgctaccacgcctggctaatttttgtattttttagtagagtcagggttttgccatgttgtccaggctagtcttgaactcctgacctcaggtgatccacccatctcggcctcccaaagtgctgggattacaggtgtgagccatcacctccggccgggggttaactaattaatcttgcctatctgtaaaagaagatgctgataacccctcatcagggtcataggagaattaaccagcctccagagagaaagccttcagctctgtgcctggtgcggaactcttcttcttgtgattattattgagaggctagagtgacctcccgttttgctgaaggccctctctggaccttctctgccaactttagtctggagctcccactgtatgtcaaccctggcatactgtgcacttaccttttccttctttcctacctccatcaagaacacaggcacaggccgggctcacgcctgtaatcctagcactttgggaggccgaggcgggtggatcatgaggtcaggagatcgagaccatcctggctaacatggtgaaaccccgtctctactaaaaaatacaaaaaattagccgggcatggtggcgggcgcctgtagtcccagctacttgggaggctgaggcaggagaatggcgtgaacctgggaggcagagcttgcagtgagcaaagatcacgccattgcactccagcctgggtgacagagtgagactctgtctcaaaaaaaaaaaaaaaaagaacacaggcacaacatgccaccaggagctgggaggtagtccctagagggcagatctccctcatgtctcctgccctcaatcaatcaccaccaccagaggctccccatcactcccaggcctctgccttgcttgcccaggagacagggaatctgcagttaagtgacattctctccccagcggttaggaaaggggagattaacctacttaccaagacatagactaggccagagcctggatgaactgggaatctgatcgaaagtttgcaaaattagatcatgctttcccagggtttccttccagcagggcctgatgcctgggactttttcttccttgaatggaagttgtcactgaatgtcaagtggcctgggttctagtctctgtgccctaacactctgtgtaaaatgaagtaactgtcccattctggtctgttttctcatttgtaaaatgagacaccttctaattctaagagtgtttttagagacaaggtcttactgtgtcacccaggctggagtgcaatggcctgatcatagctcactgcagcttctttgcattggctgggcatttactatgtgccaggcccagtgccaggcattttataaggatcatctcatctggtccccatgactgctctgtgagacaaggaatgtgatcctgacttacacaggaggaagcaggctcagagaggggacttgcccaaaggcccacccagcaggtgaacagaagcctccctctgaagagcctgtccagttttccctgaggtgctctgctgacaacactcctaaaatctgcacaccaggggagtctcccaagagaaacagttattggtgagagagggtcacaatttggggatacatttccttttcttatttatttatttatgagacagagtcttgctctgttgcccaggctggagtgcagtggctccaacttggctcactacaacttccacctcccaggttcaagcaattcccctgcctcagcctcctgattagctggggctacaggtgtgtgccaccatacctggctaatttttgtatttttagtagagataggacttcaccatattggccaggctgatctcgaactcctgacctcaagtgatctgcccacctcggtctcccaaagtgctgggattacaggtgtgagccactgcgcctggctggatgcatttatttttcttttaaaaaagtatctttatggtcaggcacagtggctcacacctgtaattttagcaccttgggaagctaaggcaagaggaacacctgagctcaggagttcaagaccagcctgggcaacatagtgagaccctttctctaccaaaaaaaaaaaaaattagctgggtgtggtggtatgtgcctgtggtcctagctactcaggaggctgaggtaggaggatcacttgagtccaagagttggaggctgcagtgagccatgcttgtgctactgcactccagctcgggcaacagagggaaaccctgtttcaaaaaaaaaatccctttatggccaggtgcactggcttacccctgtaatcccaacatttgggaggctgaggtgggaggatcacttgagcagaggaggttgaggctgcagtgggccatgttcatgccactgcactccagcctgggtgacagagcaagaccctgtctcgaaaaaaaaaaaaaaaaaccctaaaacacaaaactctttatattattactgcaatgaaaatatagcatttccacatgtagttttatacaaattatgtggccagtgttgatttttcccttgagaaaacttcccaccatgagattataggtgactgtgtcaagttttggtgtcttgctgcataatccctctgattccccattcccatctccacaataggccactcggccccttgctttgctgcactgggaagatcacagaaatatcaggccagtattcccggagtccctggagagcccagaggaagtggggaggtccggaagcaacagacagtaggtcaaggccatggcagggagacaggcctggctcaggggccttcccctcctcccactgcatgagtgcgtgtgtgcgtgtgtgtgtgtgtgtgtgtgtgtgtgtgtgtgtttgatgggctagggcagagtgggctggttttcagcttgtatttctgtaatacaacttgactcttttaaaccatgaacatgtattacttggatgtaaagcaaattaaatagcaaaagcacaaaaaccttcgcaaatttgataggtggtaaatgctccacggttgcttggatttgcattcctttaatttctggcaaggctgtacatttctcaaatgtttctgcaccatctgtattttctctacacttttggcatttccctccagggaatagggtaatggctgtggggcctggcacctggaggcagacagatctacctacaagtcctggctctgccagttactggcaagggacttaatctccattttttcttgtctgtacattggagataaaggttgggtttcccttattcaaaatgcttgggatcagaagtgttttagattttggatttttttggattttggaatatttgcatatgtataatgcaaatcttggggatggagtctacgtgtaaacatggaatgcatttatattttatatacgccttatacacatagcgtgaaggtaattttatacattgttttattttatttatttatttttttcttttgagatggagtttccctctgtcgcccaggctggagtacagtggtatgatctcggcacattgcaacctccgcctcctgggttcaagcaattctcctgcctcagcctcctgagtagctgggactatagatgggcaccaccatgcctggctaatttttgtatttttagtagagacagggtttcactatgttggccaggctggtctcgaactcctgacctcaggtaatccgcccgcctcggcctcccaaagtgctgggattacaggcgtgacccaccatgcccagtctatacattattttaaataattttgtgcatgcacacatccattcccagacctctcgaaatctgtcctgggctccctcatcccacctccatccagagttgcctaagttgtaggtccagcagaggcaggattgcttggtggtgagaaggttaggtctggctcagatcaaataagaagagataaaatttgccttaaaacttgcctggcaatggctttgctgcacggtctgaaaacacccgttcccgccctctcgactgaaatttccttgtgacacagagaaggacaaaggtctgagcccagagttgacggagggagtatttcaggattcaattctgggactcctaaaacgacgagggtgttaggaagcgaggcacagggtggggactgggaatttaaggagagctgggaacagatcccttaggttcaggaagcttctgcgcaagcagtgaggatggctggggctagggggctactccgcctgccacactagctgtgagttgagcaaagccctgggctcatggtgccccaaaagcctgcggcctcaatcctaggcctgcacgacacattcaaaaggattgttttgttttgtttttaaagaaagatgagattggcttggttcttcatgggcacattttatatagctctttttcttttccttgctcattttgtttcggggaagaaatttgtactgtattgagattgtgaagaacatctctgcactcaaacagtttacagaaataaatatttttaaaataattttgtgcatgaaaccaagtctaggtacattaaaccattagaaagcaaaggtgtcgggtatggaattttcacctgtggcatgaggtcagtgctcaaaaggagcatttcagattttggatttttggattagggatgctcaacctgtagtaagtttacctcatagggttgctcaacttttaactagaaaattaacataatgcaacatggtgaaaccctgtctctaccaaaaattaaaaaattagccagtctcataacttggtatcaaaaaaaataagtaaataaaaattgaaaaataaaataatgtttttaaatgctgtattttgttttattttattttgagacaggctcttgctttgtcacccaggctggagtgtagtggcccgatcttggctcactgcaacctctgcctctcaggctcaaactatctccacttgcctctccctgacaccctggctcatttttgtattttttgaagtgatggaattttgccatgttgccaaggttggtctcaaactcctgagctcaagcgatacacccgccttggccttccaaagtgctaggactataggcgtgagccaccgtgcctggcctgtattctattaattttccttcctcccttcagaaggacatagtatatctgttgtttgtttgtttgtatgtatgtatgtttgttttttgagacagcatcacactctgtcacataggctggagtgcagtagcacaatcacagctcactgtaacctccagctcccaggttcaagtgatcctcctgcctcagcctctcaagtagttgggactacaggcatgcaccactacgcctggctaatttttgattttgtgtagagacagggtctcgctctgttgcccaggctggtcttgaactcctggtctcaagcaatcctctggcctcagcctcccaaagtgctgggattacaggaatgagccaccacacccagccagatgctgtatttcttttctttttcatttttttttttttttgagatggagtctcactttgtcacctaggctggagtgcagtggcatgatctcagctcactgcatcctctgcctcccgagttcaagtgatttttctgcctcagcctctcaagtatctgggactacaggtgcgtgccaccacaccaggctaatttttgtattttcagtagagatgggtttcaccatattggccaggctggtctcgaactcctgacctcatgatccgcctgcctcagcctcccaaggtgttgggattacaggtgtgggccaccgtgcctggcccagatgctttatttctaacaaactcctaggtgatgctctgctgttggtccaaagggccacatttaatgtagggaaggaaacgatactgtactagtagcaatgggctagcatggctgggcattagtctctgtgttttactgggagattggtggtgttgtagtgagttaggttggcagaggttgctaaggaacttccactgtgactcacactagtttacaaagtactttcacatatatcatctcatttggggcattattttaatgtcatagggtgttactgtaatcattattatatcatgagtcgttattttaatcccctgcccttttcttttgagttggggtctagctcttatgcccaggctgtagtgaagtgctgtgatcatagctcactgcagcctcgaactcctgggctcaagtgatcctcctgccttggcctctcaaagtgctgggattacaggcatgagccactggacccagccaccagctctttttttatagtaaggatttaagactcagaaggattggttgggtgcagtggctcacacctgtaatcccagcactttgggaggctaaggcaggtggattacttgaggccaggggtttgagaccaacctggccaacacagtgaaaccctgtctctactaaaaatacaaaaattagccgggtatggtggtgcaagcttgtaatcccagctactagggggtctgaggcaggagaatcgcttgaacctgggaggtggaggttgcaataagccgagatcacgccactgcactccagcctgggcaacagagcaagaccctgtctgaaaaacaaaaacaaaaaaaaggccggtcacagtgctcatgcctgtaatcccagcaccttgggaggctgaggcaggtggatcacgaggtcaggatatcgagaccatcctggccaacatggtgaaaccccgtctctactaaaaatacaaaaattagctgggtgttgtggcaagcgcctgtagtcccagctactcaggaggctgaggcaagagaattgcttgaacccaggaggcggaggttgcagtgagctgagattgcgccattgcactccagcctggtgacagagtgagactccatctcaaaaacaaacaaacaaaaaacacatagcagagctgggacttgaacccaactacatttaactccagagcctgccacccattccatcattatgtgcagctcaccttaagaacatccagatcctgaatctagcctggagggaggcagctgagctgagccaggcctgtgggtcttgtctctaccacgaggtgttacaattggtcattcagatggtttgcaattaagcctttgtgggttcctgttcatagagccaataatctctatttctttgggttttgttcctttcttgtgaagcctccctcctaggtctctgccttcctgtttctgtctggactggtgtctcttctggcctactcaccagctgtgatcccagaatctacctttactattattctgcgggctcccatcaccttatgtttgtgttggatctgttccttaggtcctcagcctttctctttcttgacttacttcttcattttggtggagcacaacctctagtaacttttggaaaaagggtgcatggaaggcaaatattttgaacccggtgtggtggctcacgcctgtacttccagcactttgggaggctgagacaggcagatcacctgaggtcaggagtttaagaccagcctggccaacatggcaaaaacctgcctctactaaaaatacaaaaattagccagtcgtggtggcaggcgcctgtagtcccagctactcgggaggctgaggtaggagaattgcttgaacctgggaggtgaaggttgcactgaactgagatcacaccactgcactccagcctggatgacaccactgcactccagcctgggtgacagagcaagactctgactcaaaaaaaaaaaaaaaaaagtttgagcttgtatgtcttaaagtgttcttattccaccttcttacacttgatcaagactctgggagttgaatcctatgttggaaaccattctccctagaattttgaaggcattgctctgtttacctctaatctgtagcattgctggaggagaattctgtttgcactccaattacagagtctttgggactatttttcttccttctctggaaaatctggaaacaattttctctaatatccaagagttacggtacgccaagatatcatgtcttggtgtgggtctttttgtgtgtgtgctggaagccagtaaaaccatttagaaattcatgtgcttcagttctgagaaaattcttgtattatttatttgatagtcttccctctgtttcctctgatcttgctaggtctcctattttttggatgttggatttatgaagttttaagatatggacaagtttttacttttcatgcaggcacatctataaactgttttcctacagattttgctgttgatttcatctttaaaatattcttcccaaccccaaaattatataaccaacttcactttttatgttggcaatagcagtttcaaaataaggctcatgctgtttttcttgtctaagctgtacggcaggcagcagaaatgagtgagtatttgttagataaataaaagagtgaaatgacttattgatttaaaaaaagaaagaagatccatgtaattcattttatctagcatcttattgtcagcagggattctgatttttattttttattttttaaatttattatttattatatatttttgagacagagtctcacttgtcacccaggctggagtgcaatggtgcgatcttggctcactgcaacctcagccttctgggttcaagcgattctcctgcctcagcctcctgagtagctggaattacaggtgcccgccaccacacccggctaatttttgtatttttagtagagacggaatttcaccatgttggccaggttggtctcaaactcctgacctccagtgatccacccgccttggcctcccaaagtgttgggattacatgtataagccaccatgcccagccgggattctaatttttaaatgtgaaaacaaatattttctttacaaaagttagtaaaatgcatgaaaaaataaaagataaataatgagcagaaagagctcctaaatattcagtaaacacaatagaaaagcattaaaagttttcaaattatttccagacacaaaaatatggaacatccattgctgaaacaatggtgtgaacaaagaagaaaaatacaattttaaaaagaagaagaggccacgcatggttgctcacacctgtaatcccagcactttgggaggctgaggcgggtggatcacttgaggtcaagagttcgagaccaacctggacaacatggtgaaaccccgtctctactaaaaatacaaaaattaaccaggcatggtggcgggcacctgtaatcccagctactcaagaggctgaggcaggagaatcgcttgaacctgggaggcagatgttgcagtgagccgagatcatgccactgcactccagcctgggtgatacagcgagactcagtctaaaaaaaaaaaaaaaaaaaaagaagaagaaaacagccaagccaataagtaagctatagcatcaaggtggtaaagaaacccaaagatggttgggtttgtgccaggacaagggtcaggtagggtgcactggctcacacttccagtgctggttagactctcagacagcagttttctgagatcctactaagcaccagcccatcagacatggcccataccctcttggtgttgatgagctagaagtgaagaagataagatttgactgcaggaaagaacgtgatagctatcattaagggtccctttggaaatcatcatggctcttggcaattagcacttagtaggtgttcatcaatgagtctctggtgaaggggatgtggcagcctcccatatatcgagctgtctgaccgacttagaaacaactctaaaaggaggagtcctgaagaaacagatcctttaatgatagaagccgaaattggtaatttggagaggcagtgatatggagcgattagaaatccaggcactggaattaggccagtcctggccccgacacttccaaatgtgggacgttgggcaagttacttaacctttccatgccccagtttcttcatccataaaatgaggaaaataatatctgcttcatgttggaaagattacatgagacattgtgtgtaaggcacagtgacagaagataggatagagcattccttcactatctcaacttgcctccatcaaatcatcattctcactgcccaagtggcggctcaaaggcagtagaagccaatcatgagcctttttcccatcagctaactgatggctctgaaatctcaatgtggataattttcatgactcttcctgtggcatttctcccctacagtgtgggggcaggacacactctgaagctgcagaggcagctgtggccatggctttcgcaggtgaaggccgcagtgctctagagaatggggatagattgaaaacatccatgtctccagggcttccagaacaatgactaatcaggcccacagtggcagctcagcatccctttccaagtcaatcatcccatacattttcaaggccagctcatactccgcccagttctgtcttatgagggagcttttttgagcatccttgtttagaaatctgcaacctaaactggcattttcgatcattttgcaatccttgcaatttactggggtggaagggacccaccaaaaataatgtctttaatttggcaatacctgtctatcaaagttacaaatacacacatttctgacagcaatctcagttcaaggacttcatcctaaagatgtactcacatgggtgcatcatggacatggccagaaagagattggaaacaatctaaatatccttcagtaggagatgaggataatggcatatgcacataatggaatatcaatcatgtaacatttatttaaatattgaaaatagctattgaacacatagtatacgccagccactgttcgaagtacttaggacacattagagagcaaaataaagattctctgccctcatagatctcatattgtggcttatgtgccacaagctccacaaccaaggatatgaaaccatctccaagtttatatacttttgtatgtatgtgtgtgtgtgtgtgtgtgtgtgtgtgtgtatatatatatatatatttttttttttttttttgagacggagtctcgctctgtcacccaggctggagtgcagtggcgcgatctcggctcactgcaagctctgcctcccgggttcacgccattctcctgcctcagcttcctgagtagctgggactacaggcacccgccaccatgcccagctactttttgtatttttaatagagacggggtttcaccatattagccaggatggtctcgatctcttgacctcatgatccgcccacctcggcctcccaaagtgctgggattacaggcgtgagccaccgcgcctggcctatgtatatatattttttagacagggtgctctgttgcctgctctgttgcccaggctggagtacagtggcatgatcatagctcaccacagcctctctggctaattttttattttttgtagtctcactgtgtggcccaggcttgtcttgaagtcctgggcttgagcaatcctcccaccttaccctctcaaagtggtgggattacaggtatgaaccagggcacccagcctccaagttatagtgttaatttttttttaaaagccaggtaaagatagagaggatatatgctagcatgtgtgtaaaatatatctttgtgtttgcaatgcatttttctggaaggattcatgataaactgaaacaagtaatggcccctgggaaggagcactgagggaccaggggtcaggtttggaagggaataattacttttcaatgtttgtaaagtttacatttttaattctgtgctgtcttaccgcaaaatacaaaataaaacataaaggcttttacttttgccaaatgcctcaaaccctttctttactcctctagagcaggtttctcagccttggtactattgacacttggggctgaagaattctttgttgcagggggttgtcatttagccacatccctggcctctacccattagatgccagtagcaccttctccctggttgtgacaaccaaaaatgtctccaaacattgcaaattccatggaggcagaatcacccccgcttgagaaccactgttctagataacacatgaaataggggtgtagggtcactgtctccactagacagataagaaagttgaggcccaaagaggttttattttgtttttaagaattgtgtgccttggccaggtgccgtggcttatgcctgtaatcctagcactttgggagactgaggagggcagatcgcttaagcccagaagtttgagaccagcctggacaacagaacgaaacctcatctctacaaaaaatacaaaaattagttgggcatgaggcacacgcctgtagtcccagctactcgagaggctgaggtgggaggatcacctgagcctggggagtttgcgactgcagtcaggcagtcagccctgagcacgccactgcactccagccttggtgacagagcaagactctgtctcaaaaagaaaaaaaaaattgtgtgcctcattttctttgttatttattcatttataattttaaatggacactgttttgctatactttcctactttttatttattagtatttatttattattttgagacagggtctcactctgttccccaggctggagtgcagtggcacaatcacggcttactacagcctcaacctcctaggctcaagcattcctctcacctcagcctcccgattagttgggactacaggtgtgtgccacaacacccagctaattttttgtagagacaaggttttgccatgttgctcaggctggtctccaactcctgggctcaagcaatcctcctgcctcaacctcccaaaagccaccacatacagccctttccaactttttaagcaatctatcaatatataaatggatatatgaaagcagaataaatatagtttctttttaaattttgatcagtttctggtaatgttttagctatgttaaagcttactggagatgttgggtcatatagcatgataatcatttaaacaataaatgaaataatttatatcaagatacaggggggaagctcactaactggatacttgacactctgaacaatgacataaaatatgtgttgaaatatcaaatctcttgctttgttcaaaatgtacactttggggtaggcatggtggctcacgcctataatcccagaactttgagaggccaaggtgggcggatcacctgaggtcaggagtttgaggccagcctggccaatatggtgaaaccttgtctctactaaaaatacaaaaattagctgggtgaggtggcgaatgcctgtagtcccaactacttgggagaccgaggcaggagaattgcttgaacccaggaggcagaggctgtagtgagccaagatcgtgccactacactccagcctgggcaacagagcgagactccatctcaaacaacaacaacaacaataaaaccgaaaaacacaaaaacaaaatgtacacttcactccccgaaatttggagttggctgttcctgtttttccagttgaattatttttgcatcatgagggcatgactaaggcttatcattttttgtatcctttttttgtatcctatggtttccgagaagctttaaaatgaaggcacccagcagggtgtggatggagtaaagaccaggacctgggacagaggaggaagcaggcagggactgtcatcagacgtgggatttgaaaacacaaactccaaggctgcatttcaaaaaagcctccaatctactgttgggccttggcagcatggaggcagtttgtggtgttggccagggagggctgtgtgtcccctccccagatcctcctgatctctaggttttgctgtgctggtggcagggatcacaaagaccaagacatgaccttagcatctcacggtgtgtcggggttgacagacccataaccagacaatagcagtctagtgagctgtcaacggggatggcaaagggtgctctggggaacctaagaggtcaggggggacgtgctggaaggggtgacgtacagcctaggtctgaaaggacaagtctcagggacatcaagtttatgcccatcttttatttattttttattttttgagactgagtctcgctctgtcgctggctggagtgcagtggcaggatctcggctcagagcaaactctgcctcccaggttcaagcaattatcctgcctcagcctcctgagtagctgggattacaggcatctgtccgccacaacgcccagctaattttttttgtatttttattagaggagggggtttcaccatgttggccaggttggtctcgaactcctgacctcaagtgatccgccatcctcggcctcccaaagtgctgggattacaggtgtgagccactgcgcctgaccagtgtccagctttttaagatttatttttatttctagagacagggtctctcattctctcgcctaggctggagtgcagtggtgcaatcagagctcactgcagcctcgatctcctgggttcaaaggatcctccctccacattctcctgagcaggtaggacaacaggcatgcatcccatgcctggctcacatcttctccctttcaccttcacatgactggctcctttttgtcattctggtatcacagcttaaatgtcacctttttaggaaggccttccctgaccaccccatggaaagtagactctagtcacttccggttttattttcttcaaagcacctctctgtagctggtcttgtttatatggtggtctgaattgtttatccatctgtctatttgcttgctgtccatggcctcctccagagtgggagctccagggaacagagaccttatccacctgttcacagctgtgtccccagtgccctgggtctgcagtgcatacttgatcttatggagtgaagaagagatgtgccaggtgatgagggcagagtggaggtatgtgaacagggagggtatctctagaatgcactgtgcaggtcaaggtggagaaggaatttggctttgacaccaagatggggggacaagaggcttagcctgaggtacaaatgggaaaagggggaatctagacaaccttgagggagaagtttgactaagacagggagcagatatgtggggtgggaattagaggggacacccagtccatggaggggtattatcagtactttttttgttttttttgagacagggcctcactttgttgcacaggccggaatgcagtggcgtgatcttggctactgctcattggtggggccaggcctggcccagcctcaatctcctggactcaagtgatcctcccacctcagccccccaaatagctgggatcacaggcatatgccaccatgctgggctaatttttaatttttttgtagagacggtgtttcactatgttgcccaggctggtcccaaactcggggctcaagtgaccctcccacctcagcctcccaaagtgttgagattataggtgtgaggcaccttgcctgctttttgtttgtttgtttgtttttccctagagacagtgtctcagtatgtctcccagactggcctggaacttctgggttcaagtaatcctccctcctcagcctcctgagtatcactgggactacaggcctgtgccactatacccagctattatcagtatctttaataggaggaagacaagaatgtttttagactgacggtcaccaacccaaggagaccaaggaaagcgggggacacctggagcaggacctttgaggagacaggaggggagggagccacagagccctggtggaagcattgtctctgactgctggagggcacctgtttcactgtgtccagatggagggagaagtgagtgggtgccagctacaaaggctcattgtatgcagtgtgcatggtaggatgtggtggtctgaattgtccatgtcactgagcagcaagaccagctggtgtaagcagtggggaagaaatgcaaggtggttgggtaggggccaggagtcaagcagtagatgtagctgggagggaagtaggtgaagccaggaggggctggtaggttgggcgaagaggaaggtatcaagggactggaggaagagcaatacatagtgggactgtgaaggtggaaaggactgcagagtcgggtctgacaggggggcacctgagcttcggatttccaagatggagcagttctgagggatgacacagcccaggctttggccctgagacctgatggctgaggtggagtggaaggtcactggagatgagatggaggaagtaggtgaccctgtactacacaaattccctagaggacagacaggttgagggtggagaggaagccagaagtgagcttccaggaattgaatgaaagggcccaggagattggacaatgaggaggtgtgcgggcctcagagggcagggggcacacaaagactaaccaaggggaggaagctgaccgcaaccgccccgaggacaagacgggcgtcctcggtacagggccatgtttagtgacggcagaagggagaaaggaagctcctgggagcacagggggaaggggagccggaagccagagccagggctggggccacgaaggacagacggccggtgttggaggcggaggctggcctgggatgtgaggctggggttggccggcctccaggctccccgggagcccctgctgaaagtctgtgggcgctggcctgggcgaagccgcggtcccccgcctgtgggctcaactctgcgctctgcttcaagcaaacgcactaggagaggagtcaggagacgaggaactgcggggccccacctcgcgcgggcaaccgctgtctgtccagggagggcccaggcctgtctccgcagatagctttgaagcagggcccccggtgtggccctctggaggcctcccgcgtccccttttgaggggctgccctgcttggcctggggaacacagcgaagggcacctcgtggagcccaatttagggacaacacattaattctggaaattccagattctttccgggggtcctcaaccggccggggtcggaaaggcctggcagggctccgccggcagggggcgctcgggacaggggggcgaggggggcggacatccgttgcggggcgctgcctgcgccgggccggccagcccttgaggcgagcacggcctgcggggccgatgaggccggggccggccggggcggggcggggccaggggcgggggaaggagtccgaggggcggggcgggggccggcagccgccctccctcactctccctccctttctttctttctttctttctctccttctagctctcttgtcttttctttgcctctgcagcggccaagggggcgggccctgcagcctttgttgcccgcggaccgagcgcagccgaacggagtcggggccgggtcgccgggagctgcacgccggccgggcatgtcctgagccggacctgggaccaggcagcgaccggacgggacggacgagagcgtgcgcgcggggtcacccggcggccgcccggttcctgccatgcccggcggccccagtccccgcagccccgcgcctttgctgcgccccctcctcctgctcctctgcgctctggctcccggcgcccccggacccgcaccaggtgggtgtccgcccctccccggccagccgggcctgccaccccttcccgctcccccagtctcggttttgtccctcctcacctttgtggaccccgcgccggctccgctgtgcctggagttggtcgcgtcttccgctccctgggtattaggggacagtagtcggggtcgggccgggccgggagcgaagccgcgcttctggggaaacttcctcggcccctgattcagttactgacactgcctgtcgcctggaataagccccttccgctcttcgggctccggtttccccacctcgggtgcagcaacgcgcctggctcccgggagagctctcgtccgagtgggctggacggagcgcggtttacccactgaggatttggtttctcacactccttagcgaggctcgcctggaaagcgggctggccgggacacagccggcgagggcgccaggtcgcaggtcttcgcgggaccccgccgcccccccagctcccgcccaccgcatctgggctgctggcgcggcccctggcggctcggggggccgggtcttgcgcggtccttgcacttcctgcctctcccttccccaagtgtgaagacgccgggagtggagcggggagcaggagcttcttttcccggccatgggttaactctccccgccccgccgggccggcctccgacgagcctctggcctgcgtccagactcttgtttggcggcgacctgccgggcggccgcgctgctggcgcgtccgacgcagccggcctgggaattcagtaaccgaggatgtaggagaccccaggcccggtgctcagggagctcccagtcaggggagccggtggatagtggggagagtcctgcaatagagccgaccggcaggctttgtaggagaggaggggcatgaggttggagagactggaaggatggatggattctggatgagctagaagggcgtggagggagtggggccctcccctggggagcatcagtcgggggactggattagggttgcttgctgggatggggtcgacctgcctccccactggagggattgtgacgagaaagtagtctgggcgggaaggatggggacattgactcttgatcttagaggtttgggaagccgttgaggggagcagctgatgaaagcagtgttttggaaagatttggtctagcagccatgcgcagagcgcagagggagcgaacatttaatgagcacctactgtgtgccagcctcacgggttcttatttctcatcatctccacaacaaccgtgcaaagcaagtgatggaaagtccttttatggaccagcaaacaggctcagagtagagcgacctgtggggttggactcctgagcttcctgaatgaggcttgtgttttccactgtccagagctgggggctgaggaggatgaaccgggcgatgggaatgggagagcaggaaaatgcttccctcaggacttgggtcctggccccctggcagctgtgggaagagttgggtgcggtcaacctcgtgggattcttatgaggattaaatgagatattgaatatgtcagttgctcaggcaggacacagtgactacaatgtagtggtcattatttttattaatctgccaggccgacccaggactccccagatgacctggacctgctgtttgagggtggaggcaggccaggcactctctccaacctaatctgggcacaaacactccaagggtgaagtctgtctctagtgttcccatagatatagagcatggggtccttcctgttctgcactccctcaggattggtgactctgaggctgctggcctgtttgtcattttctttgaagcccaggacctaagcctggggctcctcctaccactgaatgttaccttctttaagaccaaagggctcatcctgggctcacttttaggaaaatatatcccttttccccacttgtgactgacccagggacctgctagggtttctgaggctggagcccagtcatgtgtcctcctcatgccgtatggcacatgtgaactctgtgtgcatgtgtttctgtgcatactagaactcacagaggagggcattcacatactaccccccaccctgccagttatttttcctccttggcatgagctgtgggtcatttgaagggctggattgtaactcaggttcttgatagggaggtgagggtaaacaccatcttggcatttctttggtagaagctccaaagtgacagttctgtcacccaggggagatattaaaagtatttaacacccaatgtggcaggagcttggtccaatcagaacagacctcctgacttggcagaatagatttggccatgaatctctggcagtcctcttgaatggtgcctgttgccatcccactgtcacttgaactctgcaggctcagctttgttgcaagcacataaccggtcgagactggaacctgcaattactccttgctggcactgggtggtgctagtttcagccaccaacatctctactgagtgaggtcaactaggctacagtgaaagttacttatttttaaacttacccctgcactttttaaaaatattttaatggcaaaacaatacaagttcactataaaaaaaggtaatgctggcgggctgcagtggctcatgcttgtaatcccagcactttgggaagctgaggctggcggatcacttgaggccaggagttcgaaaccagcctggccaacatggtgaaactccatctctattaaaatacaaaaattagctggacatggtggtgcatgcctgtaatcccagctcctcggaaggctgaggcatgagaattgcttgaacccaggaggcagaggttgcggtgagccgagatcgcaccactgcattctagcctgggtgacacagggagactgtctcaaaagaaaaaatctgaacaaaacaagaaaaaaattattgcaataaaagtggcaacatcctgtaagtctattcttttattgttgattgaaaaacatgttttagaccagacacagtgattcacacctgtaattccagcactttgggaggccaaggtaggcagatcgtttgagcccagaaattcaagaccagcctgggcagcataatgagaccccatctctacaaaaaaatttaaaaattatccaggcctggtagtccacgcctgtagtcccagctatttgggaggctgaggtgggaggattgcatgagcccaggaggtcaaggctgcagtaaaccacgatcgcatcactgcactccagcctgggagatctcagaaaaaaaaaaaagaaataaataaataaaaacatgttttttgttttgttttgttttgtttgtttttaagccattaggcaaacagataaaacaacaagtttttaaaagaaaaagctaaatatactttagaagttctcttgctaattttcagtcataacttagctcacatttgctatgtgccagctgttgttataagcacttacatactaactcatttaattcttacacaaccaaagagagcagctgtaattattatcatccccattttacagatggagaaactgagattctgagtggttgagtaatttacccatggtctcacagatatgggtagcagagctgggattcaaacacagcctctctggctctagagctcactaatccgaatgcttttcacctgcggcatagctctacttagccctgtccacatttttgaacttaataggatgcttctttgtaagtcatctggaatttctgtcttgcaatatttgcccaggatctacagcaggtattctcaacaggactgtacatccgctggggcatgggttcttccccagagatactttattttttttaagcttttggggccttttctccccagtggttgattcctcagttacatacctgcttccattccccaaccacatgcatttgaggacaaaacttgcctaaaagagtgtcatgtagctcccccagttgagaattttagagctggttggcatcagtgcccccctgaccttcagctcatctttagctgccttggctgggattgtccttgccctgggaaccaacgttaatactcacttaaaacaagtgttggagggtgggcatggtggcccatgcctgtaatcccagtactttgggaggctgaggcgggtggatcacctgaggtcaggagttcgagaccagcctggccaacatggcgaaactctacctctactaaaaatacaaaaattagttgggcatggtggcttgcacctgtaattacagctacttgggaggctgaggcaggagaattgcttgaacccagcagccggaggttgcagtgagccaagatcatgcaattgtactccagcctgggggacaagaacgaaactctctctcaaaaaaacaaaaacataaacaaaacaaaacaaaaacaagccttggagttgtagcctccacgaactgtgatccttgggaaagttaggaaatctcccactgcgagtgaacctgggaagtagttcttccctatctctgtcattttcgtctccttgacctgggctcccttccttacgttttctggcctggattctccaagcagatgaggaaacaaacccagagatatgcagtgactcagattatacaactattaagtggcccacttgggcctgccctgggtcttgttactttcaaagcccatgctctatagtgcattattttgtccctccattgcctcccattttacaaaacacatgcctggaccaagattaaacttcttgttgccctttcttacttctggcttttccccacttctctgagggtttaccacacagtgcccctaccaccatgaggcccttcttgtcttcactgttgaattaacatatgttaagggacatctcaaatgcatcctccttgatgaaacttttcttcattccaatgcatccataaggtgtcatcctttccccttgcttggaccttgtcagcactgtgccagagtgggggtcttgggtctactgcacccatttttctgttttttttttttttttttttttttttttgtgtgtgtgtgtgtgtgtgtgtgtgtgtgtgtgtgtttttgggggggggagtcagagtctcgctctgtcatccaggctggagtacagtggtacaatttctgctcactgcaacctccgcctcccaggctcaagtaatcctcccacctcagcctccggagtagctgagactataggcatacaccaccatgcctggctaatttttgtatttttgtagagatgggatttcaccatgttgcccaggctggtctcgaactcctgaactcaagcaatctgccctcctcggtcttccaaaatgctgcgattacaggtgtgaggcactgcgtctggccatttctccatttgaaggcaaggatggtgtcttacccactttcctggactttggagcacctagtgccccctcacagttagtagccaagggtcacataccaaatgccgtggactaggcaggtaacgtaaatgagcaaacaaggtgggtagggagacagatttttcctgaaacatggggcctcttggcctatctcttgttttcccacttttccattctttactgagtgaaaggaaacacaagcatgatgggaaagggagcctacttgcagccacagtactgggaatgaatatggagtggtggggactgaggaccggggagcataggcccttcctaaagggaactcactgctccaccccagccacttctgccagggagcaatttaagcctgacatggatggatgataagacttttcaagaaaagctgaaaattgagatttttgtacaagatcatgtgattcttaaacattggcaattgactaaaacgtttttcaatatttgtgtcagccaaaacaaaccaaaaaatcaataactgatcaacacaagcaaatctgcacgctgtggttgaggagttgtagtcccatatgcccttattaggatgtcagagcaagaagtcgccttaaatcatccagtccggtggcttctgaatgccagcctctgaactggctagatcagaatccctgggaaggtctagaaaaacacagaaaatacacattctagggcccccagagccctggatctgtgcaaccagaatctctgggctgggtcctgggcatctgcagtttttcagagctctccaggtactgctgatgaccagccaggttcactcccagtgggggatttcctaactttcctgaggatcacagttcccggaggctcttggtaaaaacatagcttcctagtccctagtcctagtttcctggaaatgctgatttagtgagtctgggatggggcctgggaatttttttttaagaaattcatctgtgaggtctggaaaatccttgcactagtggcccgctgaagctcaatgatggggaagattagctcagagccacacagcacgttgccccagcctacccagtctcttgactctcagagaaagctctttgaggctggcatcgctgcggcggttgtgagcagagggagatgctctcagcaggggcacagcactggcatgtgcagggcactctacgtgcagttcggcagaggacagactggagggcaagtttggtttccgcagcctgctgggatggagcttcgggctgggcagcagcagaaggaaccctggtgggatgtcagcagggcgctcaggcattcatgcgagcctgaagagtctattgtcgtgaacagccaggatcctgggagctgggtataaatccaatcgagaaactccggattgccaagttccctaactgtgctctttagagcctgggaactgcagagagggaaaagaggggggaaagcatggatgccagagctcccccaacccccggcacatgagatttctcttgagactagaactggtgtccaaagagatttgagaaacgtgatctaattcaactctttcacattaatgatggggaaactgaggcccagtaagggatggactgttgagaatatagagcaatgttactgaagagactgaaaccatttgggggacttgagtctcagtctcagcactgccactctcactgttactgtgtggctctaggccagtctctccacctctctgagcctccctttgctgtctcacctaggaagcagtctggacaccttactgcaggtgtcctaacctggggtccacagcctaagggaccgtgaactgaggggatccgtgaacttgaatgggaaaatattacatatttactttttgtaatctctcaacgaaatttagcatttccctcaattatgaatattattagcaaatcccagcagcacctgtggttttgttaccaatacagcaaaccaaatatttttctatctcattacagttgttgcacgtatcttgaaataaggtttacgttcatcactacttcaaaatatccatagttgccaggcacagtggctcacgcctgtaatcctagcacttttggagtctgaggtgagtggatcactagaggccaggagttcaagaccagccttgccaacatggcaaaaccccgtctctactaaaaatacaagaactcgctgggagtggtggcatgcagctgtagtcccagctacttgaaaggctaagagacaagaattgcttgaacctgggaggcagaggttgcagtgagccaagattgagctactgcactacaccctgggtgacagagagagactctgtctcaaaaaaaaaaaaaaagaccatagttgttaaatttgccacaaaatcttgtttaaagtataattccacaccctactttttaaattattttttgttttgttgtgttttgtttttgagataatgtctcactctatcacctaggctggagtgcagtggcgccatcatgactcactgcagcctcgacctcctgggctcaagagagcctcccacctcagcattccaagtagctgggactataggtgtgcaccaccttgcctggctaatttttttttttttgtagtgacaagttcccattatgttgcccagttggtcttgaactcctaggctcaagtgatcctcccatctcattctcccaaagttctgggattacaggtatgaacgactatgcctggccttaaattattttgataactgtatttcaatctaatcaatttccttggtactcctgtatgttttattttatttatttatttttttgtggcagggtctcactctgtcgcccaggctggagtgcagtgatgcgatctcggctcactacaacctccacctcccaggttcaagtgattctccagcctcagtctcctgagtagctgggattacaggcaggcaccaccaagcctggctaatttttgcatgtttagtagagatggggtttcactatgttggccaggctggtatcaaactcctgagctcaagtgatttgcctgcctcggcctcccaaagtgctaggattacaggcatgagccaccgtgcccaaccactcctgtgtattttattttatgcatttcaaaacattgttctgaggagaaggggtttgtggcaaaaaaggataagaatccaggccttactaggaaatccaggaggacagagcaacagagaggggtttttaaactgcaagggcctgagcagaggtctgccaattttttccatccctggaacctttctttaaatgaattcttgcatgtaaaagaaagaaaccagagctaccctgttgaagtggtggttagcggccagggagccccagtggggtggtctttctctgtctccccaatccaggaggcctggagacacttgcagaatgctcacgcatctgagagcacatttttaaatccgtcaggctaataataatcataacaatcataattgccatcatattcaaccagtggctcaggcactgctaaagggagtagctccaccaggtttaatcctcacgacagcatcgagattgtaagtgctgtggttatctgcattctacagagtcattcaataaataccaaaaaaggactaagttctggacacttcctctaacacttaaatctttaacaaagaatataaagggccaagtgtggtggctcacacctgtaatcccaacaatttaggaggctgaggtgggaggatcgcttgagacctggagttcgagaccagcctgggcaacacagcaaaactcccatctctacaaaaaaaaataaaaaattatccagggccagccttggtgcctcacgcctgtaatcccagaactatgggaggctgaggtagaaggatcacttgagcccaggagtttgtttgagaccagcctgggtaacatagtgagatcccatctgtattaaaaaaattaaaaataaaaaaaaattagccaagtgtggtggcacccacctgtagtcccagctacttgggaggctgagatgggaggatggctcgagctcaggagttggaggctgcagtgagctatgattgcccacctgcactcctgtctgggtgacagagcaagaacccatttcaaaaaaaaaagcaggggcaaagaatatagattcttgccttcctagactacactgggagggaagggagaaaacaaataaatagaaaaaataatgaaaatgctaagtgatatggtatgtcaggagtgctgtggggaaaaataaagcaaggaagggggatagggagagctagggagttgcaattttaaaataaagtcgttagaggaggcctcattgagaaggagacatttgaacaacaacccaaaagtgaatggtttagccatgtggaaaacagagagaagagtgttccaggtgtagggaacagcaatgcaaaatcctgaagcaggagcacgtctggcctgtggaggaactgcaaggaggccagtgggtggagtggagggaactaaggctgtgtagctggacatgagattggagaggtcaccttgcctagggcctcatacaggctagaactttgtcttttgctctgagtgagatgggcgccattgcaggagagacgatgagtagagtaagacgatgagcagagtaagacgatgatcgcgctggttttgaatgaatctttctggctgctttcccttggtgaaaacacgaggggaggggcacctggggtaggcaatagtgaaaacagagagacctgttaagaagttaccgcagcaatccaggccgggcgcagtggctgacgcctgtaattgcagcactttgggaggccgaggcgagcgtatcacctgagttcaggagtttgagaccagcctggccaacatggtgaaatcctgtgtctgctaaaaatacaaaaaatagctgggcgtggtcgcgtgtgcctgtagtcccagctactcctgaggtggaggttgcagtgagccgagatcgcgccacgcactccagcctgggcgacagagcgagactgtctcaaaacaaacaaacaaaaaacccaaaacacaacaataacaacaaaagaagttactgcaacgatccagatggagaaactgaggcacggaaagatgaaatagcagagttagtagatagcccggcgaggatttgaatccagatactctgactccagcagccccctcttggccgctcccttctggtccccggccaccagcaaggacccgggtctgccctgggcctaggcgtttgtggttctctccctgcaggacgtgcaaccgagggccgggcggcactggacatcgtgcacccggttcgagtcgacgcggggggctccttcctgtcctacgagctgtggccccgcgcactgcgcaagcgggatgtatctgtgcgccgagacgcgcccgccttctacgagctacaataccgcgggcgcgagctgcgcttcaacctgaccgccaatcagcacctgctggcgcccggctttgtgagcgagacgcggcggcgcggcggcctgggccgcgcgcacatccgggcccacaccccggcctgccacctgcttggcgaggtgcaggaccctgagctcgagggtggcctggcggccatcagcgcctgcgacggcctggtgagtgagctgggacatgtatacttggggcagtctcgggtggtgggatgtgcagattggctctagccttgccacgcacttgtctggtggctttgcccagtgcactttttctctgccagcctcggtattcacgcctgtaaagtgggagtgacaacgcaggcctcgttgatctctaggataacagttctcaaagtttaatgtgaaagccgggtggtggtgcacctgtagtcccagctatttgggaggctgaggcgaaaggatcacttgagcccaggaattcaaggatgtagggtgtggtgattgcgcttagctggcgacacagcgagaccccaggcactctcaaaaaaaaaaaaagaaagaaagaaaaagaaaaagagagtttaatatgagctcaaatcacctgcaggccctgtttaaacagaatttttgcaggataggtctgggatagcgcccaaacacttggatttctgaaaacatctcaggtaatattgaagatgcaggtccagagatcccattttgagaacctccgtttgactggactaagtaactgaaaaagcagttgacttctcttccttggggcatcagttatgactgttccttcacaggtccctttaggctgcttttctccaggaaagctacccctcaccctgtagccattatgcagggtgtggtgaggaacccctttcagcccctctgctcgaatcagaactccaggaaaagcaggtctcagcttcctggcttcgcctggctgaagggtggtgctggctactgcagccctaattgctccctgattgggtgctgattagagcagcttccactccaggcagagtagggcccctttctgttcgtgttcaggtgaccagccccactctcccagctctggagggtgggggtttgggaggagtaggggatgtgtgcacactctcagcgtccactgttcccaggaggccctcagcttagattgctcaggcaaaaaccatgggctgtggccgcacagggcctaatgacagggcagcccacaacgcaagctgcacaacgtctggacctttgaaggcccatctgccctgcacagtattcccatttatggagcctgtgcctgtcccttaatgtacaattgatcttgttgagcctgtgccacagctgtgcacatggggcatcattcccatttcacagatgaggaaacaggctcagaggggaacttgcccagggtcacctagtcattcagtgagtggtgggcgggagggggggactccgcattcatacccaggtctccagacccaagagctgatgcactctccagccctccctccaggccccctggtcctgtgtgacccaaggggcagaattggtgcctatgaggggaagtccgagggacataaaaccttctttcctgttggagccctgagcttcctcaggaggtagtgggcatcaaagatgcttcccagggcccctcccctccctggactctgaatgctggcggacatgtccaagacactcctgccagcttcccttctctgggcagccctgggcccagagaacagggtgtcctggtggccgtgggcatctcctccgctcgggtgtggctgtggatgcttttggagtgattcattgccttagggagatagagggaaggtcagaagccctggccagctgggagggagcacagtgctggaaatggctggcatgcagaggagatggagaatagcctggaggcctgggcacaagctgccccactcaggatggctgtctgggactaagacaccgttttgtcagatttggatgcagacacatttccctctcctaatggggtgggtgtgtggggcagcatccccaggggcggaggcttctgagctccgctttgaaggtttggctgtgtgtgaaatggcagagaagggctttccagatggaggctacagagtgagcaaaggcccagcgggaggaaagtacagtgtgtccgcgggcagtcacaggtggtgtgggcagtgggggctcagctgagcaggacgggcctctgggacgtgcaagaagagcagctgagggccagccctccctgtgtgaccctggtgcttcttccccagaaaggtgtgttccagctctccaacgaggactacttcattgagcccctggacagtgccccggcccggcctggccacgcccagccccatgtggtgtacaagcgtcaggccccggagaggctggcacagcggggtgattccagtgctccaagcacctgtggagtgcaaggtatgctcttctgctcccagttctcgggtgggtgctgggcctggggacatgaaggggcctttctagaagccccccttaacatccccatgcccagtgccccttagaccagatgacacagacagacagatggatactttaccatagcctgtgcccttaattgtgccacaagactgtgtcctctgcctttcgggcctgccccagtcaatcccctagactgaccttcctcgctccatctcacctacttctcccacgttggggctcagcctccctctgctccctccccgccaacagcctatggtacctggctctgccagccgttcttcctccagtgcccaggccgggtgagctgtgcccagctccaacagggccactagccaggaacttccctcccaccaccaccctgctcccaccctagaataactaacctctattattgggacctggagtgtggtacccagtgcctcctctgcagagcagcagtagtgccggccagtccaggtgaggagctgcctgctaagggttgctggggtttggggaatgcttggctagcaagccaatctcaggctgcccacagctctggtactgcatttgctggagcacatatccacagaggcatgcttcttggcctcagtttcctcagcttcatagatgtgcttcctcttctgatctggagcagcctgggtcaggggagcaggcccagtagggcaagctgggctgggtcttggccagcctccccaggctggggtttagagggtggggtcagcctgtgttgggatgcactaagcccccagggtgggaggaagtgacacggggagataggggcccagttgccagctttgtcaggcccaggagttcccctcccatggacacagtactttaccatgtttatatccaccatttcatttgccctttgaggtccccctgtgaggcaatttattcctatttttagtcagggaatctcaagatcagaaaaggaaagtgaccaggcagagccacacagcacagatctgggacagagccaggaggcgaattcaggcccctggcctctgatccctgtgtggttcccagtgccccagagagagctcactgaggagaggccctggagacgtgtgccctgggcctgtccactggcagctaactccaccccatctgggcctccagtgtacccagagctggagtctcgacgggagcgttgggagcagcggcagcagtggcggcggccacggctgaggcgtctacaccagcggtcggtcagcaaagagaagtgggtggagaccctggtagtagctgatgccaaaatggtggagtaccacggacagccgcaggttgagagctatgtgctgaccatcatgaacatggtgagtctgtgtgggccaggagcgggtggcggggatggtgttggggggtggggtgcaaagagtgggtgcagggcaggaaggctgtcaggctggaccccagacccaggtctaggccccaagtaggaagaagggtatccaagctcctgaggccaggaaggggtgggggtcttggcagctagtcactatgagagagcctgggcagagggctgctgtggggacaccatagggtgtcatgccactaggagggggagcaggagtgggagactgaggcagccacaaccctgtgcttgcctggggggcttgtagactagttgggtccttcatgtttccctgcacagatacttccttcctttgtgtcaggacctgtgctagatgctggaaacacagaaatgcctgatcagactacactctgcctgagactctgcctgagacatcagcacacattacagttagaagaatctgtgcagttctatggtcactagctggtagccttgggcaagtcacttgccccttctgagtctcagcctgctcatctgtgaactgggcatgacgacagtaccttgtggggtgggcaaactgctcttgaccccacatgatggatgagatatcagaggccttcagagggcgagtaacttgcccaggtcacacaaccaggcagggcagagccagatgggagctcaggtgtcctaagtcccaccgggggcactgtggctgattgcagctgggattcctggagccgactactgcagagctgccactccctgctcctgccctgtgggtgcccgtggaggcctcaggctccaagctgcttcctgcagcccctgggaggaaagatctctgcccctggcattcttagcagccacctggttggcaggccaccatataaccctgtttctctcctgggctgggttgttgggggcaaggtaagtgcgtgtgctgtgaacaggataatatctaaaggagccctggggccaggatcctatgctgctgcttccccctgccagcccctcacctcctgcaaccctaaaggaagtaccctctgagatcatgcagtgtctggccccctagtttatcgctgtgaaacctgaggctcaaagagaggaaggggctgcatccagggctgttatctctacctgctggccaccacgtccccactacttgagtcctcatcagtgagtgcagctctgggccagttcttccctcactgggacaccctcattggctccctgttccatatggaataaaagtcacagccttctgcctggcatttgaggccttgaaggcccagatcaagcttcatctgcccagggaggggagccactaacagccagggttcagcagggctattgctggacagcagggcccagcccctgggctataggggtggagcaaggggcaaggccaagttctcaggccctgaggttccctccttctcattctcagcactttgggggctcagcctgaaagaccctggaggctgacttgagccaccaatggttaactgggttcatttcacccccacttttctgagtgtcccctatgctccagattctgggcagagtaagacgcacccgactgggtattgtggttcatggttataatcccagcgctttgagaggccaaggtgggcagatcacttgaggtcaggagttggagaccagcctggccaacatggtgaaaccctatttctaccaaaatacaaaaaatagttgggtgtggttgtgcacacctgtagtcctagccacttgggagtctgaggtgggaggattgcttgagcctgggaggcgaaggttgcagtgagctgagatcgtgccactgcactcctgcctgggtgacagagcgagactccatctcaaaaaaaacaaaaacaaaaacaaaaaaagacctgcccaacccaacaggtaccccataacttaacctgggtgacaggattcaggtgtttttgccccagggcctggccccttcctggctgccttgccctggctcataggacctacccattcacttggtgagccccatcctcggggagagggtgggactggttctcacactcacctgctctgacaatatcaagcttttctgagctggtgagcccagcattgttcaggacaggatgggggcacctatgagcctgacagtgctggaccccctaggaggctgcagggatggcagggacatgggaacccatatggccagcctctgaggaagcctggactgtggagccacggcctaaggccctggtgggttagggctggagccttgtgaatatctgtctaccttttgtgcagtgttcaacacccaccacctcatctaagcctcacccccattttattatttatttacttctttagaggtggaatttcactcttgtcacccaggctggagtgcaatggcacaatctcggctcactgcaacctccgcttcctgggttcaagtgattctcctgcctcagtctcctgagtagctgggattacaagcgtgccccaccatgccttgctagtttttgtatttttagtagagagggggcttcaccacattggccaggctattctgcccgcctcgtcctcccaaagtgctgggattacaggcttgagccaccactcccggccctcacccccattttcaagttgaggaaacaaagattcagagaggtcaaggggctcgctcaaggtcacgcagctagtaagtggtacagctgggactggagctcaggtctgtctacctccaaagccccattctgtcccctgtgccccttaacctgccctggagaggggcagctgggaagccatggtggccggggtgggccagaaggatggggaacagatgttccctcgggatcagatgtttatttaagactgacttgttgagagccatcgctctacctgggataaagtgatggatgtggaagagcatgatcctacacttggggactctgtctcattgtagcatttcccaaggaatatttcagggagtgtgttccaaagaatgccagtagtgcactgtgaaaaaaagatgctgctgttgaataagtttggccacacagggttaaaaaaagtaaaacgggccaggcatggtggtgcacacctgtagtcccagctacttgaggggctgaggtgggaggattgcttgagcccaggaggtggaggctgcagcggctgcagtgagccgagatcatgcaactgcactccatcttgagtgacaaagtgagactctgtctcaaaagaaaaaaaaaaaaaaggtaaaacagacttcgttactacaggacttctcagacccttcaaagtaaatatgcattgagaatccccaacagaataggcaggcagcattccccaaacttaggatataagcaggggctttgaagcagcgaaacctgggttctgagcccagttttaccctctctttgagcttcacttacctcatttgtaaaacgaggataattgtgcctaccttagaagtaagaagattaaatgagataatgcatgctaagcccccagcacagggactgtacgtgttaagctcgattgaggttggctgcggctatttttttggctgctgcagtatctgacccacagccaccttcaggacagcctcatctttctttaccaatgctacctacagaccccaatttatcagcattctccccgtgctagactcagacctgagtcctagagcttgggtgggtctgtcccaaggatagcaagacaggtccctttttaccccattttctttcttctttctctctctctctttctctctttctttctttctttcttttggagatggagtcttgctctgtcgcccaggtcggagtgcagtggtgcaatctcagctcactgcagcctctgccttcccgggttccagtgattctcctgcctcagcctcccagggggctgggattacaggcatgcaccactatgccgagctaatttttgtatttttagtagagacgggtttcaccatttggccaggctggtctcgaactcctgacctcagaggcaaggggaggtcagagaggaaggcagggaccagatccaagaagcctgttggctaggctggggacttctgtccttttcctggacagtgaagaaccacttactgccttaggcaaaggcatgtcatgatgaggtttgcatttcaaagatcgatggtggagctgctaggctgcaggtggtctggaggggccgcagaatatggggacactcgtaggagacctcaacaactgagcagacgaaatgatgatggtaacttggacgaggcagtggtgttggagatggagagaagagacagagtcgggcaaaacttgggaggcaaaaattggttggttgtattggagaaaggtggttcaaggctcccgggctcccagcctgtgtgtggaggtgacggtggcacatgatatcgctgtttatcttccccatttctgaccttgggttctgagagtgtcattcatccccataatcagggactttggtgccctcttaacagtgtttgtttggttccttgctatttgaatattctttttcttgatgcattgctagaagccaactcacaactggcctgttctgccatccctgccctctgggaacctgccagctgtccccagtcatgggctggcctcttttttgttctgagggagttttaaaagagcagatggctttccccagccatttcccctcaccttggcttatcttccatctttggggatagccccgtctcctgggtctcagtagggagccccatgtagccatggggcctctgatagatgtgcacacctgcctccttggccccatggctgtcagccccggggaaatggaatagcagagcagtgggcaggctccataggcctgtgcctaccctcactctaccctctgagccctgcccagttctatgcctcattggagggtgcactcctgggatgctggtcctggcatccccaggtcaggagggcactgctatcatagccctggcagttgtaggactagggccctgcgacaggccaagaaaccagaatttggaggtctgagctgccatcgcctgtgctgggtgggcatggagttggtactgggaagcagatcccaaactgaggctcaggagaggctgcaactctgggaaggggcctcggaggcctcttgtcctctccaggttctgctgctgccacattggggcagtgtgtgtgaggtgtggggacactcatgcattggtgcacatgcatcgcctgtccactgtgcagcctgtgtgcaccagtgtgagagtccctgtgtgtgagcacaggtgtgcgttgccctgcgtgggtgggtgggttggggtgggcattggctgcttgtatccttcatcctcgtgacaacctgacccccccatctcttgggcaggtggctggcctgtttcatgaccccagcattgggaaccccatccacatcaccattgtgcgcctggtcctgctggaagatgaggaggtgagtggtcatgtggtcccacgctgcccggcaatggcttcggctgccagagccctcctgccgcatgacctgtgctgctctttatggaagggcacagtgaaggccgccttggcctggaccgtgtcccctgccaccccctggttcctgactgaccctctctcaggtcccaggtcctctgcaggaggttcctacaggagggatggtcaggctggaagctcgactggtgcctgcgggcctcccacttccctgctgggcctctgtctcctgccttcgtatgggggagaattgggcctgaccttcttggaactcaggggaggcatgagcagtcactctctctgcccccaggaggacctaaagatcacgcaccatgcagacaacaccctgaagagcttctgcaagtggcagaaaagcatcaacatgaagggggatgcccatcccctgcaccatgacactgccatcctgctcaccaggtactgcagccgcaggagggtgggagcctgcatctcaggaggtgcttcccggccctgcagaagaagccctggtggaggagggggccgtgctgtcagggagcccaattttgaggagagtttgcgcacctttggcccaaggctggattctgtccgcacttggggaggtctttttattttgaaataattgtggattttctcgctgttatcagaaataatagagagagggcctgtatagccttcctccatttcccccagtggtaacatcttgcatgactagagcacagtatcccaatcaggaaactgacactgataccatccacagacttactcagatctcatcagttccacacgtacttccctttgtgtgtgtgtgtgtattcagttctttgcagtttcatcattgtgggttcacctacccacccccacagtctagatacagatctgtcccatcagaaggatgtctcatgctacccgtttatagtcacagccaccttcctcccctaacctccggcaactgctgatctgtccagaggcagttattttccctctgctggactctggaggcatctgtcagcacccctgctggatagtaaccaaaattgttctgtgcgggtctgtgctctcaagggccaaagagatgcccagccggttgtgtgtaaatgagagcacctgcttcccaagcggccaccgtgctggcctcatgtcacagaacggtgggagagacatccttttcgcttgggatcaattcggggggacccttccctggccttagctcaggtgggcctggcactgggccaggttagcctgaaggctgcttctttgcctgtgcagaaaggacctgtgtgcagccatgaaccggccctgtgagaccctgggactgtcccatgtggcgggcatgtgccagccgcaccgcagctgcagcatcaacgaggacacgggcctgccgctggccttcactgtagcccacgagctcgggcacaggtactgtgcctgcccccattgctacactgagagccgagcttcaccctcgcagcctgggggcaccgggtatccagcctgtgggtcacaaagtccaggggaaaggaagctctctggaaaaggagccctgactggccatgtgctgcccctgcactgtcccctccccacaaccaggctgcttccctgtaaagcaggagagagggctgcctgggcatctctaggactggcctggagggagtcttatttaaaggggagttgtgatgggccggaaaatcattgtaggtctttggctgtccctccccattgccctcagtgctgtattttttactctcgatccctgtccctgttcctgtttgctctgtggcctgggccagtgcctgccctctctgggcctctgtgtgcttcccatagattgaggggtttggattcagtgatgtccaaggctccctctatctgacactgctgcctgaggctcctgtcttcacaggcctccagccacctgtgccctggctgttgagctggcgaatatggcagcatcttagattgtctagcaagccatcaaaggcaggctcccagaacgttctgtgggtcaaagctgttggggtcatccattcagacgtccgggtttcgtaggcgatggccgtgcctgcaggaccttgaagctgcttatggctgcagaaagaacagcctgccacagtactgcaatttcctggctgtgttaccctagctagttccttagactctctgagccttcctgagggtaataatgagaactgagtgagattgtgtttctgaaagtgcttagcatggcccctggcacatagtagatgctcaggaaataatttttcttgtatccttcccaaggatggtctctggagacctttctgtgatacagcagctcagatcccttaactcaagtgcacagccttgggacaaggacctgtgagtgggaaccgctgtcagactgttcttgaggccagtgagcttgcaggggccatcacgggcccacatctgtgccacctgatttgccattgctggctggcccccaggcaggggcagggctgctctgggtccctggccctcatttcaggctggaacaggagcccttgggatactagctgtcataccctcattttacattcaggaaactgaggctcagagaggggaatgtgactttctgcagccattgggtgcagccattgggtggcagaaccagccctgggaactaggactgcgcaccttgtgggtgtccaggggagggcaggctggcagcctcccgccggctcacccgcccctggggcctgtgctctcacacagttttggcattcagcatgacggaagcggcaatgactgtgagcccgttgggaaacgacctttcatcatgtctccacagctcctgtacgacgccgctcccctcacctggtcccgctgcagccgccagtatatcaccaggttccttgagtaagtcccccagccctgggcccctataccttgatccatgaggtcaaggtctactgggagagatgcagacagtcatactgcagggccggggtagagggaagcagaggggcaagatcttgatacatgaggtcaaggtctaatgggggtgatgcagacagtcacactgcagggccagggtagagggaaacagaggggcacctggcaaagatgtggtgccggcatcccaaatgtcctcctggaaggaggcttgaacttggaggaggagcaagaattcacacatgtgcagaagggagaagaatggtgttcttggtagaggaagcctgagaaaggcctgtagcggtaaaggagcgggagagctttcagggaacggcggaaccctgagcaaggctatgggagcaaaggctgcgtaggaaatgaagctggaggaggtgagggacagccacaaggtccggtcagagacaggaagaaggggccattaagggaactgaaatacgaagctttctccttttttttcatgttctcttcatttgttctggtgtttttgttgttgttgtttgtttgttttttgagacagagtctcgctgtgttgcccaggctggaatgcaatggcacgatcttgactcactgcaacctccgcctcccgggttcaagcgattctcctgcctcagcctcctgagtagctgggactacaggcgtgtgccacaacggctggctactttttgtatttttagtagagacgagcttttgccatgttggccagactggtcttgaactcgtgacctcaggtgatccgcccacctttgcctcccagagtgctggaattacaggcatgagcggtgcaccatgcccggcctgttctggtgtttttttgttttttttttttcaaatttgctatttaatgttctaagtaagaaaaagttttaaatttaaattattggcataaattgtaccattcatctttattttgtgcagtgccaggtttaaatgcaaatatgagtatagctgaccccagaagaactcgggggtcaggggtgctgactcctgtgcaattgaaaatccatgtataactttcgactcgcccaaaactgctaatagcctactgttgactggaagccttactgataacataaacagttaacacatattttgtatgttgtatataatatatactgtattcttacaataaagtaagctagagaaaagcaaatgttattgaaatcataaggaagagaaaatatgttcactgctcattaagtggaagtggatattcattaagtggaagaggatcctcatcctcttcatgttgagtaggctgaggagggaggagaaaggcaggggatgatctcaggggtggcagaggtgaaaaaaaatccacatgtaagtggacctgtgcagttcaaatccatgttgttcaaaggtgagctgtattaacttgtatgcagagtcactgaaattatacaattcgtcttttgtagctcatatttaccagaggatgaaacagaataaaattatctcaactggtttcatctcactccttggtatgtgcacattctacccaggctgtctaccttttcttaccaatgaggaaggaaagactgaaaggagaaggaactgtggggttctctttcctcccgtgtcttcattttctgcatagcgattggctaatacaggggtgttaacatgggtaagaaaggatgatggggcaccttggtcattgtcttctttctgcatttgaagtaagtctggttcaaatggaaaatgcagcctctgggcctgtcagtgctctcctgtcccttactcagttgttgacataacatgtttaacatctaattgctttgagtctcaccgaactcctacacattataggttctgagctcatggaccaaagtaaatgtgagatgcaaatggggcagcaaggaatggtggacacagacattgcctgtgtctcctctgctcagatacaggctcttttgtcccatcagaccttgcttactgtccggaccttgcttgtggtggcttatgcctgtaatcccagcactttgggaggctgaggcaggtggatcacttgaggtcaggagttcgagacaagcctggccaacatggtgaaaccccttccctactgaaaatacaaaaattagccaggtgtggtggcgtgtgcctgtaatcccagctacttgggaagctgaggcaggagaatcacttgaacccaggaggcggaggttgcagtgagccaagatcgcgccactgcactccaacctgggcaacaagagcaaaaaaactccgtctcaaaaaaaaaaaataatagaagatggcaacagcagagcattgtacacctgccccacttctccccaccctccattgcttttttctaggcaaccaccttcaaacttaacattgttagctttttcttgtatttactttcctatttccaaaaagtattgctagactctcatttattgattttccagtttagatattatctggaaggttgggatttagcacccttgcatcacttcctgtacatacatttgtcccctcacttttcatcccaatttagtgttaacatatttggattaagtccatattccgcattttcattattatggctgtaaatcttgatgtctgaactaagtgttgtaataagatggcatttctttctttcttttctttttttttttttttttgagagactctcactctgctgctccagctggagtacagtggtgcaatctcagctcactgcagcctctgcctcctgggttcaagtgagtctcatgcctcagcctcccaagtagctgggattacaggcacctgccacccctgcccagctaatgtttgtatttttagtagagatggggtttccatgttggccaggctggtctcgaactcctgacctcaagtgattcaccaccttggcctcccaaagtgctgggattacagatgagagccactgcgccccatctagatggcatttctttttaagaacaagttttttatttgcttggttttcattgcttctccaggccttccagatcctttaatagttttataagatgtcttttaatccagttttcccaaaggtaatccctaccagataatccagcagttcccttctttcttggaccctcctcccaacttccctgtgtcctccagtttagactggatgctttctagacctgccccaaaatattcatggagggtcttcctgtttcttggatcccatgctactttttttatggggaggtaccttttttttttttttaatttgttttggtggagcacatcctcaagcagctttctgagaaagagtgcatggaggtaaatggtttgcctgtctcaaagtgtctttatccttccctcacatctgattgatattttgatttgatatcaacttcgggttggaagtgactcttcttcagaatgtcgaaggcatttttctgttgtcttctagtttccaatattgctctgtagaggtcccataccattgtgatttgaatgtgaccttttaaaaaatctggaagcttttaggactctctctctttctctctctctttttggtgattttaaattttacagtatatgccttggtctattttaatttgagggagcactcattggactgttttaatctagaaacttgtgcccttcagttcttgaactgttgttgtattatttatttgacaactttcttacattttctctttctggaacccttaatattcagctattctctcactttcttatttttaaacattttacaatttttcatctctttctattttattttcttttctatcctccctccctccctccctccctcccccctcttcctctccctctccctctctctctctgtctttctttctttctttgagtctcgctttgttgcccaggctggagtgcagtgccacaatcatggctcactgcagccttgggctcccaggcacaaatgatcctcctgcctcagcatcccgagtagctgggacaacaagtgtgtgccaccacacccagctaattttttaatttttaattttttctagagatggggttttgccgtgttgctcaggctgggcttgaacttctggactcctccctcagcttcccaaagttctgggattacagtcatgagccagcgtgcccagccacctgtttctattttctagggggcatctgatttatctatactttacaatccttctattaaaattttcatttttttcattctacttttaatttcttaaactttctcattcactaaatatacattgagtgtctcatctgaaatacttaggaccagaagtgttttagattttggattttttttttaatttttgagtatttgcattatacttagcagttcagaatccccagtctgaaagtccaaaatctgaagtgctccaaagagcatttcctctgagcatcatgttagtgctcaaaagttttggattttggagcatttggattttgagattggagatgctcaacctgtgcaccttttgatcctattcttgtttcatgggtacagtatgttctcttatctctgcgaggttattacttacatggatttgacttttttcttctgttccctgaaatgtttttctttcctttgggttatttttaaaaaaatatttgtttcatgttaacagtttccttggccaggcgtggtggctcacgcctgtaatcccagcactttgggaggctaaggcaggcggatctcttgaggtcaggagtttgagaccagcctggccaacatggtgaaaccctgtctctactaaaaaaaaaaaatacaaaaaattagccaggcctggtggctggtgcctgtaatcacagctactcaggaggctgaggcaggagaatcgcttgaacccgggaggcagaggctgcagtgaactgagattgcgccactgtactccagcctgggcaacagagagagactctgtctcaaaaaaaagttttcttaaaatgcattggctgtatttcatatatagcaaggagatgcagagatactcattgtgcagtttgtggacttgggcaggactcttccaagtctctgctgaaggactggtttggatgggggctattttggggagatcctctaatttcagtatctgaggtcatttttctgagtgattcagttttccgagaggaatcctctaggcttttcctgggagagtgtatgtctggctgcagcattccagcttggcgtgtttcttacccttcaatgtgtagattttgctcgtccccttttctctgtaggtccttctgccttgggccttcatgtatgtctaccattcctgggccagagcctcctggttcaccctccccagggagtgatccccggccctctgctgggtggcaggtggccatcacttggctactcagggttggggaggggctctagggtctgatcggttcttacagactttcagccctactgtcttcagccctcctggcactaaggccctgaggggtccctggaaactccattcctgagcctttccgggcttctccttctgggtggttcctccctgcaggcagttggctctcagcttttatcactctaccaagtcagctactgcctggccatctgcttcccagcttccagaatcttgttgacatccttcattacccatcatcaccccttatggatttatgccttgtttatttcctctactgtcatcatagtggagttttggaagggagcagcgataaatctgtctgctcaacatgccatatttttctagaagtccactcactgtggggcttaagcagggatgtgaccaggtccattagggatgtaagagcaaggatgctggcctccagtggaagagggagtactggggtggggggtgggattggaagcagagaagagttttgtttggtggttaaggacctagactggccaggcacggtggctcacacctataaacccagcactttgggagactgaggcaggcggatcccttgaggtcaggagttcgagacaagcttggccaacatggtgaaaccctgtctctactaaaaatacaaaaattagctgggcgtggtggtgcacgcctataatcccagctactcgggaggctaggcaggagaattgcttgaacctgggaggtggaggttgcagtgagccaagatcacaccactgcagttcagcttgggcgacagggcaagaccatcttgggaaaaaaaaaagaacctagactgtggcccaggcttctacctgtgttggcagacaagttatattagctcttaagcctcaaaaaatggacatgatgatgggcctgccttgtgcatgtgatatgaggaataagtgagaaaacgcgtgcagtgcttagcacagtgcctgccacacagtaagcatttcacgcacactcattactattccttccactgttaccaagtgatagatgggatggacttgaaccagggaagtggcctgaagatggggaggagggtgtgtctccttccccagagagaggcagagaatgagagaatggcttcagaaaatcagaatagtagctgcccccacagcacccccagggcttgttcccagctgcccagacccagggtgctgcccaacagcctggttctaggacagacagacagacagacaagtctctgtcctcattcagctgctggaatgcttgagggacttggctcggggcctggggtgagggtgagaggacagggtgagagtcagagccagccggggcctcccagagccttggcaccggggagaaccagacagaagcagagcaatacgtgcctccccaatggaggggtgtttgggaggaagaagaaccccatcctcccaaggtcctttcacactttcacctttgcatcctgggagtcaggcagcagggccctcccgaggcccaggaggtggaaggaagagggtgtgcggaggtggggagggtggcagcagcctgtcttccagcctgcagcctttggtctccttgctggggatgggacaggagagacaggatgggccccacccaagcaggttgggggacagaatgagtgagattcaccgaaagtgccaaacagtcaggcagtgtttctaggacttgggggcgtcgcagaggcactcacagaccaccctctcatcctggctggtcctgaagccctttggcttcctgcatatagatgcttatccagccaggtagacccacagggctgaatccaaactcgttcttgctgtgtccacagactccatgtccatcaggccctgtgtgtggggaccgtggtaaaggagacagacctccaggtgcctgtcctccaggccctcacaccatggggagatggacagatgacagttggggatgattggcactgaggcatgcagtcctcgtgggtctgtaggaatggggagagggccaccaagccctcctggggtcaggaacagtgactcggagaaggagcctgccttctaaaggccagcttccacgccgaggaagaagggtgctgctgtaagtggagggcaggctgggcagaggccggggccatgcgagtatagggtggggcagaagaaccctcaggaggtggtgggggggcactggagggtagcttctggagcttgtccaagagggttgacctgaagaactctaagaacctttccggactgacaggtgctttaagggaccctggggagaggtcacagcatttcaccagtgtcaacttggacctgggtggggaggaggggaggccctggtccctgctttcctcaaagccagcatttctacagggagagaggcaggctgggtcacatgtggggtccttcacttcaccccgtggaccccccattcagtgactccatgaccagatccctggggtggccaggggtggccaggggagcgggcccccaggtctctcctgtcagtggcaggcagctctttgcagtctcaaggtgagagtgaggcttctgactggagtcacctactgtctcctttgacctcttgtgggactgcccagccccgctataattagcttaaggaggggcgtggaggggaagggctgacgggtttggggatccgggtgtgtcggcagcgcagaggacctggcagtgagcctgccagaggaaggaagggctggctgccggccgcctgtgtgatttttcccaagaagacactgctatttatacccctgtagcttgggatcagcctcttgtagatgaggacgtgaaggcccaaggccacacagcatctatagccaggcaaagagtagaacttgggtttctgactcccaagacagcacctcggcctgattctcacagtggattctgtgagggtcgcctcatgctcccgacttctcccacacacccagggtgggctgagaggttgttgtggcttcagctgcccaacagcaggcccgcaggagccacatgtgcagcgagtcagcactggggcagccaggaagcagaagggctgggctgcagcccagggactgttggtgctgggatgaggtgcattggacccctcagccccagggtcagaggaccccctggctgggatgggtgagcccccagtctacctcctcgagccacagaatgctagcgggaaggagggagcccagggccagctgaccccaccacccgccgctgatactctgccccgggtgcaggcccagggaggctcagggagccccaagccgcaggagcacttgggacactcctttctccccaccaggtctcgctgccatggttttgaacttgtatgtggggtgaagtatttgaggccaggctcgcagttgaatgggaggagccctgcactgggggtagcccagtgagtagacacagcctggtgcaggcagcctgggcctggctccagatcctggccatcacatctctcttgtgcgacccggggccagtgacctatgggccctgagtgcatgaggggagatgatggtagagtctgcccaggatgttgtgaggagcaaatgagagggtatgcccccagcaccctggaccagcctggcatgtgatcatcttgggcactaggactgcatccagcagctgctcatctgccaacgcccatgttagaggatctgtttccagccagcatgggcagtctgagtgattccaggaggattccagggttctcagtagaagtctggtcaccttggctttcttctccgcagctctgggcagggccgggggcctgtcactggtcgggggatttaggagaccacgcaaacacccactccactctggatctccaagctgccaggccccctcctctgaaatcagggcttcgggagtccatggtctgatccaccctcccagcctctctccacacctgccttcagtggtcttggccctgtttcctgaccctttcgtgttctcccagcctctccacatctcggagtgtctctttctctccctgctggactccaggatctatcacctttgcccttcttccctgtgcaaccccctgcctgtcccaatcaggactgtatgctcatcctgaccctctgtcctggcgccacctgccctgaggccacccagactggagaactggagggtttgtgcctccccatctcctctgcctggctagaggccccaggtcccgcgggtcctgcctccctccattgtttctgcccaagtcgtggctgcctgggtcgtccccagccctgcaagtctgtgtggctcaattctccccagccactgctgcccccagaaggcagcaaaccttcctccagttcctccaggacagcaatgagccatgggcagggtggtcagcatgccagggcactcctgctgctaagccatagtggtggccacctaaggtccagcaggggcagcaggctggtcactggtcccagaagcaatagcatgcctgagggttgtacagagtgaggcaggggcagaagcgggtgccagaagggactgggccgccctccccagggtccctgcttccatgcttcctgcctcatggtgttgtgtctgagcagccttgtcttcaccacaccacagcagcaggagtgtgtggtggacacagatggcgcctgcttgtgtctgccagtttccccgctaccgctgccagggaatgccagctggaggaaggcaggagtagatagggtatgacagaggccggaggccagccctgtcggggtgtgggggaaacgggacaggcatggttgccctgggctctctcccaggggaggggctgctttccagacctcgcctttccacagatgacccaaggtctctgcctgggtggggccgtcggaggctctgttgtgtcaactgtgatgtgatgttctccggatccttgtcgggcctggctccagggtctgggctcagacacggaggctgcagggtcggagagcagggccacatgacggcttggtggtccaggaggccttctgagggaagggccctggcagcgtgtgcggaggcctgggattggggttgggattgtttagccagctggagtgcccaggaggtgagatgagagaggccgggagggcctgtgctgctggctgcaggtggaggatcggctgagccgagcggggaggctggagtttcctacagttgtagggctctgtgccccctcccacctctcctcctgtcccggccccaccaaggcttctccgatgggtctcacaggctgcgcccccctccatcctcccgtcccatctttagccgtgggtggggcctgtgcctggacgaccctcctgccaaggacattatcgacttcccctcggtgccacctggcgtcctctatgatgtaagccaccagtgccgcctccagtacggggcctactctgccttctgcgaggacatggatgtgagtggggccggtgtgggtgtgggggtgtggggacccggcaggagggctcagggggcagctctcaccagcccgtggatgccagcctgggagcaacctctcctggcctgggctgcgcccctgagtgacactgtgagacgtcaagtggcctgtgggagaggccagggatgggcggccacagacccagctctgaattctgggtcaaccatggaccaactgtgacccttcggacaagtcccttcgcctctctggagctggcttataagagggaaaaggaacccctgtggagagggtctgtttatcctggcgaagatcgcctgaagtgatcttctaacaggagtgtttccagaggaggggctgggccgggagaggtgtggacagctggggaccgctctgagcagcgcagccccgggcgccccacaccaccacatggtccggggaggaaggtgggagcaggcacacaagaaggaacctctgggggtctgtgggcccctgccatgtggaggggtgcccaggggacccttggggacagggaggggggcagggtgggtggcggcactggggagggtgtgagggtatggcccatgccctcctcctcgcagaatgtctgccacacactctggtgctctgtggggaccacctgtcactccaagctggatgcagctgtggacggcacccggtgtggggagaataaggtaggggatgtccccagtcccggcagtgggtgtgtgagaggccagacttcctgctgtgaccaggccctggggtcagccccggctcacagtcttgcttgtgctcctagcagagccccacgctctctgcagcccaagcccccatctgcaaagtggaggcattggggccagggcttgattccatgattccccagggtgtcttcagctgagtcagcatgtgggctgttttactccccgctcagctcctccatgtggcctgggtcacagatgattgtgatgattgtgagggtgcctctctcaccttccatccttcccctctgtgcctttcgcagccttcccacccaccttgttctcactagggtgaggatgactgatagacttgggggtggggtggctctacctccgtctgtctcagtagtggtgtctcagtggggagtgcgtacccgtgggcttccggcccgaggccgtggatggtggctggtctggctggagcgcctggtccatctgctcacggagctgtggcatgggcgtacagagcgccgagcggcagtgcacgcagcctacgtgagtgtggggcccagggtgcccttgggcagtgggacagagggacccaaacagtcagccgattgcaggagcttggctctgtcccagcccctggctcttagaagtgtcctgataatggtcagtccgagtgtccaggccaccttaagtcactttcaaggagtgttctgggggctgacagggtccccacttctgacccctttccagagagggggacactgaggcccagagactagagagactcatcagaggccacatggcaaagcagctgctggctggaaggaggcaggagagggcagtggggaagagcatgggccctggaccttagatggctcagggttcgaatctcctcttcaccccttctctgggcctccatttccccatctgtataatagcagtgcccatccagtaaagttgtagtcaggggcaaatgcagtttatgcaggccaggccctcagccctgcagctcatctgtagtgggcactcagcgggaggggcttggtggcctcagaggctcaacaaaggtctgagatgagacggagcagctgggaggatgggacagcactgaaggggtggcctgacgtgagcgacttcacctctctgggcctctgtttccccatctaaacgggggggtgggggtgcagggggtgtgaagatctggtgagaagcagaggcaagtggtactgtagaccgaggcactacccggctgatcttcacttcaggaggccacccggggcaggcatggggttcacagccagccccacccagggccctgcgcttacccaagagtggcctgtgcccctccctgcctcctggcctccaggtctgagctgggtgggggccagcgaccctggcctagatgcggaggatttcaggagctgtgctaggtcagacctttcagctggctggggccctaggcacttcctttagacccgggctgggggtactgccaccaggaggaaggctgaggactcaagggctcgttaggatgctggtgtcatgggctggagactcggagcagtccctccagccagtgctagtcatgcctgcagcttgtcccagcttctcaacagccctctgcagaagcagccccaaccccactttatacatgaggaaactgaggcccagagggtggccgaagacttgcccacggtcacactgtaggttgggggcagagctcaggcttcctgctgccacctccccacaggtccttacaaacagggagagtgtgtctgggccagagggtgggcagcccaagggaggggagcagcgtgcacaaagctgggcagcagggatctcggggtgtggatgcaggaggaagttgcttgctctgggctgtggccatgcagtagcactcactgggccgtcactggggcccaccccggttctccccacaggcccaaatacaaaggcagatactgtgtgggtgagcgcaagcgcttccgcctctgcaacctgcaggcctgccctgctggccgcccctccttccgccacgtccagtgcagccactttgacgctatgctctacaagggccagctgcacacatgggtgcccgtggtcaatgacggtgagtgctgccccccatggagacattgaggcttagagggctgggggtgtgtgggtccaaggttaccctgtgatgcgagcaggaggcccagtcttcaccccaagcctgggccactcccactgtcccctggggctgctgctcgcccctagctccccagtctgcagccttgcagatagctatcagcccagccggagcctccagcatgttggtgctgcttgggagcctccagcctgccatggatgtgtgtcacggaggggtcttcctggtggcctccatactcccgccccagctgttgctgatgactcttctacttgggccctcagtgaacccctgcgagctgcactgccggcccgcgaatgagtactttgccgagaagctgcgggacgccgtggtcgatggcaccccctgctaccaggtccgagccagccgggacctctgcatcaacggcatctgtaaggtgtgcctggttaggaagaggctctcccagcactgcctgcccccagccccactggcaggccccaggttctctcctgggtccctcctgatcctcctcgggccatggcgggccccaggttctctcctgggtccctcctggtcctcctcgggccaccctccccatgctctaccatcgggcttcccagcccgtaccctctatgacctctaaggcaaagcccctaccacgcctcctggcactggggacccttccagtcaggcctcgcccccctgcgtctccctggatgcctgcaccagcaccgccccagccaggaaaccggagctcaggcagtggcttgacctcttgctggctggctgaccacaggcagtggtttgctccctgatagaaggggttaaatgaggtggcataggtgacacagagggctctgagccgcaaagagtagccctcagtgtgtggtaacaatttctattcttatttttaataacaatgacggcctctcctctttgcccatgtccccagcgacctacttgtccctgcttcttgccctctaagcctctggggtatcaaggcctgggctccgaggaggaccaggagggaggtgccaacccccagtgcctttgacgttgaaattccctgcacgcgctgctcaggagcccgtggcgtgtcagatcccctgcctgcccgcaggctttgcagaactcttcccttctcttgtctcatgtgatgctcatgacatgcctttaagggaggggtgggtctccccgtctcacatctgaggaaactgaggcttagggaagtagagaggttcacctgggtcagaggcacagctgaggtggggcagggccagagagaggcctcccgaccccaactcccagctttcttctcctgactctggctggccccggggctggggccacagagggctggccgccagcaccagggccctcccttccttgtgtgttgcagaacgtgggctgtgacttcgagattgactccggtgctatggaggaccgctgtggtgtgtgccacggcaacggctccacctgccacaccgtgagcgggaccttcgaggaggccgagggcctgggtatggggtgggaccgctgtggggaggggtatgctcttcacctgatggccccttccccatctcccctgggcccctgtccttggcctcgtggcccccacccagcctggagatggctaagcagggaagccttgctggggtggattcttgcaggagtcaggggacccctggcccatgtgcagagacctgtccccatggggagtcctcctgtcccagacaccccagatagggccaacccggcttgtgtgtggccccttggccttccaaagaatggtagtctcctcctgaagcttctgagaccccagctccgtgtcctcacctccggtctgttttgcacacgttgctcaagtactgactgtgtgctaggtgatggggacatgcaggtgaagcgcttagtcctggagggggacagaaccttttggtgtgaccagtgcagtggagggaggcccggagggctgtgggagcactgaggaagaaggtcctggcctggggaagtcagggaaggtttcctgtaggaggcggaagtcgagctgaatcataaaactcagaagagatggaaagggcattccaaatggaggaaagaagagcttgtgccagagcctggaggcaagaagggaaggcagggccagctatggggccttgagtgccaggctgagaagcttagattttctcccagagatgcagtgcagtgtggtggataaagcactggccatggaggctgctcataccgcagcaggatgttcatgtacgttactatccctgtctgcctcactttgctcatctgtaaaatggggataacaatagtacctatgctatagggccattacccatgagcttacacatgtgaggtgctgagagtagtgcctggcacgtgatgggtgtgatggaagtgaatgaataaaagcaggccgcatggggatgaggagggtgtcccaggagaaaggcctgggcactttggtttttttagaaagaagatgccagccagcccttagagtagggaatggatccagccttatgatgagaccagtgtaggtccccaagagaggagtgatggggcatggccacggggtcaggatttgtggcacctctgcgaggttttggtgacccatgacagatccgagcaatttagggagctcagactttaaagctttggcatcagcaggcggaggcaagtggggagagacatgaggggagcgggtggggataagcaaccctctcaccctgggcacaacctatgcacaacccttggctgacagggtatgtggatgtggggctgatcccagcgggcgcacgcgagatccgcatccaagaggttgccgaggctgccaacttcctggcactgcggagcgaggacccggagaagtacttcctcaatggtggctggaccatccagtggaacggggactaccaggtggcagggaccaccttcacatacgcacgcaggggcaactgggagaacctcacgtccccgggtcccaccaaggagcctgtctggatccaggtgcctgcctcccgtggcccaggcggggggagcagaggcggagtccccaggcccagcaccctccatggcaggtctcgtcctggaggagtgagccctggttcagtcacagagcctggctctgagccaggccctcctgctgcggcctctacctcagtttccccatctttaaaatggcccaatcttgtagctgcagttcacagaggtggctggggtcagctcctttaggactgggtggatggagaagacaccttgtgctcatgggcccccgcctgcccacccagctgctgttccaggagagcaaccctggggtgcactacgagtacaccatccacagggaggcaggtggccacgacgaggtcccgccgcccgtgttctcctggcattatgggccctggaccaagtgcacagtcacctgcggcagaggtgagaagtggggcaggcacagccccacctgcaggggcttagtgtctggacagggacactggcttcagctcccagctcactgctgggccaccacgggtttggaagtttgcttctctgagcctcagttctccatctgtgagatgaggctagcgattgccctgtgtcccaggcccgctgggagggtacatggatgaggcaggtgggtgctggctcgcggcgcatgttcagtgtgctccagctcttggcgttctccctccaggggacacagctccccctcgatagaccagtccagtggcccctcaccacactgacttatttccctaaactatttataaaaagtagggcaatttcattaactctgactcttcctccccaaatttccctctctccccatgctcctcagtcccctctctctctgtctcctccccactgctcctcagtctcccctctggccctctgtctcctcccatactcctcagtctccccgcatgcctctcagtctcccccatacccctcggtctccccccatacccctcggtctccccaccatatccctcggtctccctccagccctccagtacccccgccacacccctcagtcctcctctcacagctcggtctcccccaccattccttggtctccccccagccccctagtcccccccaccaacgcccctcggtcttcctccccctgcttggtctcccctgccattccttgatctccccacacctcagtttccccctttgtctcttagttctccccttttcccctcagtcttcccattgttgacactcagtatcctcagggtctcagaattgggaatctgagatacagacatttgagcattccttcaaatgctattatgatgacaaagtgaaactggagaactgggcagataccttccaaagctaggaaacccattttatctaatacagctgtctttattttattttgctattttattttattttatttattttattttattttatttgttagagatggagtctcactctgttgcccaggctggagtgcaatggcacaatctcggctcactgcagcctccgcctcccaggctccagcgattctccttcctcagcctcccgagtagctgggatttacaggcacgtgccaccatgcccggctaatttttttattattagtagagatggggtttcaccatgttggccaggctggtcttgaactcctgacctcaggtgatttgcccgccttggcttcccatagtgctgggattacaggtgtgagccactgcccctggcctaatacaggtgtctttaattggacaaacttgaaaaccaacaaatacacttgcagcactagacatttggggaactgtctttcagcaaattggctgcttcgcaggtggaccacttgggagcatctgcagaggcaagtgccctgtggtggctggaacagacaggggttctttgtctcaggcaggaagtcccagatgcacagtctaagctggcgggacctggagctgactggccctcagccacaccgtccttgtcacagcagcctcccctccactcctgcttgccacagatggtgtcctcccttccagggctcttgcagtgttctgggcaggaagaaggagagggaaaagggctgactcccagcgagggacttgtgcctttttctcccgagccagtactgtgtcccagacccccctagttgcaagggagcggcagtggggtgtgttttcagcaggtcccattgctgtcttgaacaaaatcagaatctgttggtgaggaaagagggggacggatgtgggactggcagctcaggggagggacaacttactctcgggaccacggggcagggggtggagcagagaaggcagagccaccagcagagggggtcctgcagctgggcctcaacaggcagtatggaagtgagtgtccaaggtgaggagcgtggctgtgcaaaggccccagggttggcagtgacagagggtgtgaaggacaggagcagtgccaagcctggtgtggggatggagagcaggggctgccccttgatgccccatttcttgtccggaggttctctgagccattgggaagggtgtggatggtgggatgatgtgtcggtggcccccggacacactgggccctgaaggctcaggcagcggctcctccagccacgagctcttcaatgaggttgacttcatcctgcgccacctggcctcatgcccttcacccgcctcatcacccaagccagccccgggaaggagcagagggaatcgggctttcattctgttcccaaggctgaagccccagccccggtcacccctcaccccagcctgggccagcctggacacttgtggtcctcctctttgggtccctggatgtggaaataggcctcaggtcactctcagtttccctgaggggagggtggcaggagccatggctgggtttgcatgctaacagcagctggcatggatcgagctcttaggatgtgccgggcacgggctgagcctgcacatgcaagaacacacgcagtcctccctccaggacatggaggaggcaggattgttgctcccactttacagaggaggacactgaggttcagagaggccaaatgagctgcccaggcatctcagctgggatgcagagggtctgggcacccaacccactaaacatccacactctgccacccctccagtcagaggggaggctacataggagagggggcgggtgagaaccaggaggacagtgaggaggcgacggtggaggtctgccttcatcctgacatgggcagtaaggcatcctgacacgggcagtaaggcgctgttctgggagggttctggcagagagggtgtctttgggtcttgggtggtgggcacctgggtgccagtcccaggctgagccccgtggcccctaggtgtgcagaggcagaatgtgtactgcttggagcggcaggcagggcccgtggacgaggagcactgtgaccccctgggccggcctgatgaccaacagaggaagtgcagcgagcagccctgccctgccaggtgagcccgcccccatcccccgccaactccccaccccatcccccgccaactccccacccccatcccccgccaactccccaccccatcccccgccaactccccacccccaggcatcctgggtctgccacaggtccctacatctgggtccctggaggccctggggaggagcagagggagccgggcttttattctcttcccaaggctgaagccccaacccccggttacccctcaccccagcctaggccagcctggacacctgtggtcctcctctttgggtccctggatgtggaaacaggccttaggtcatgctcagttttcctgaggggaggctggcaggagcggaggggctgtgccatgtcaccaggctttgagggcaggacacttacctgagcttggagctctggagaatcaaccactggcctcagtcccagctctacccaaatgccgagggcctggaagcccagcctggccccccctgctggtgagcctgcaggccacctgtctgatgccacactgatgccacctgtgtgccctcgccaggtggtgggcaggtgagtggcagctgtgctccagctcctgcgggcctgggggcctctcccgccgggccgtgctctgcatccgcagcgtggggctggatgagcagagcgccctggagccacccgcctgtgaacaccttccccggccccctactgaaaccccttgcaaccgccatgtaccctgtccggccacctgggctgtggggaactggtctcaggtgagtgtgggatgggaaggggcccgcctccagctccacccttggtcttcagctacagggaggcagacagccttcctggagaccttgtgggtgggagggaacctgggcattccagggtccagcccctgactctaaagcctcagggatcaggaagcccctggcaagcatggccacagtcatggccttgagctgggaagggccagagagggctggctggggtctctgccactctgacatcgggcagtggacaggttacccagccttgccccagcgtcccctggcagcctgcctcccagggtaagcccctcaccctggcttcccctgcagtgctcagtgacatgtggggagggcactcagcgccgaaatgtcctctgcaccaatgacaccggtgtcccctgtgacgaggcccagcagccagccagcgaagtcacctgctctctgccactctgtcggtggcccctgggcacactgggccctgaaggctcaggcagcggctcctccagccacgagctcttcaacgaggctgacttcatcccgcaccacctggccccacgcccttcacccgcctcatcacccaagccaggcaccatgggcaacgccattgaggaggaggctccagagctggacctgccggggcccgtgtttgtggacgacttctactacgactacaatttcatcaatttccacgaggatctgtcctacgggccctctgaggagcccgatctagacctggcggggacaggggaccggacacccccaccacacagccatcctgctgcgccctccacgggtagccccgtgcctgccacagagcctcctgcagccaaggaggagggggtactgggaccttggtccccgagcccttggcctagccaggccggccgctccccacccccaccctcagagcagacccctgggaaccctttgatcaatttcctgcctgaggaagacacccccataggggccccagatcttgggctccccagcctgtcctggcccagggtttccactgatggcctgcagacacctgccacccctgagagccaaaatgatttcccagttggcaaggacagccagagccagctgccccctccatggcgggacaggaccaatgaggttttcaaggatgatgaggaacccaagggccgaggagcaccccacctgcccccgagacccagctccacgctgccccctttgtcccctgttggcagcacccactcctctcctagtcctgacgtggcggagctgtggacaggaggcacagtggcctgggagccagctctggagggtggcctggggcctgtggacagtgaactgtggcccactgttggggtggcttctctccttcctcctcccatagcccctctgccagagatgaaggtcagggacagttccctggagccggggactccctccttcccaaccccaggaccaggctcatgggacctgcagactgtggcagtgtgggggaccttcctccccacaaccctgactggcctcgggcacatgcctgagcctgccctgaacccaggacccaagggtcagcctgagtccctcagccctgaggtgcccctgagctctaggctgctgtccacaccagcttgggacagccccgccaacagccacagagtccctgagacccagccgctggctcccagcctggctgaagcggggccccccgcggacccgttggttgtcaggaacgccggctggcaagcgggaaactggagcgaggcaagtggtgtgggctgggcgggcagggagtttgcgcaggaccttggtgactatttcctcatctgaaaatgagcagagtgggacacaggcgccgtctgtctagcctctcttggggcaggggttcccaggattagggggatgaggggaccccgggccccattcctgggcagcacagggggcctcagggaaggcaggggcaggcacactctggcagcacagcacaccccagaatggagctggctcagacagctgtgcagtggggacggtccccgcatggccgccaggcccagtcctccccagcaggcagcagcttccctgaggctggacctggcttctccaggctgggctcagcccactgccacctggctctgccctcagtggctccaccctcctttggcagtgacctgcaggggtctgagctgccagaaagaagctggctagtgcccctccctgggtccccagatggtcactgcaggagaaggaagcttctgttcagatccctaattttggggcgggaaggggcaggctgaggcccacagggcttgttttgcgcagggatacccagcgatttggctgctggtaccaggacccagccttccttccctggtgcctctgggaagcgacgaggctggtcaagatagctggtcggggtgcccacagggtcccctccccccacctctgcaccaatgacactggaacacaggccctttgtcccatgtgagcagggacggctggttgctgaggggatttgacttttcattctcacggtcttcctgggaggtgggtgaaggagcctattttgcaaataaggaaactgaggcccagaagagggcccctgtcttgctgaggtctcgctagcctaggtgggtagtttcctggctgtggaggcctggcggggatgggatctgcctggctttcacgggtctctgccccgcagtgctctaccacctgtggcctgggtgcggtctggaggccggtgcgctgtagctccggccgggatgaggactgcgcccccgctggccggccccagcctgcccgccgctgccacctgcggccctgtgccacctggcactcaggcaactggagtaaggtgcgtgaggatggagccaggacaggcattcccagggcatggggtggagccctggttccccacggcctgtgttctgagagcggcagggaaggggagggccccaggctgcacatctgtgtgcccgatcacaccggattctgaatctcttgggagtcttctcatctttgtctggcttggcctgtctcctttcctctgtatctttgaccccatctggacttgtctttcaccagcttgcctttgttcctccctttctctgtctgtcccagcccgtggcagcccctggccatgccaccttttgcctggggcctgccagccttggcctctcgctggggttcttcagctattcccccgggctggggcgtgggcctggatgcctttcccgccacacacctcacggggtcacgcctgtgggcctgcacatggggatgtgtccatacacgtctctcggtccccagtgctcccgcagctgcggcggaggttcctcagtgcgggacgtgcagtgtgtggacacacgggacctccggccactgcggcccttccattgtcagcccgggcctgccaagccgcctgcgcaccggccctgcggggcccagccctgcctcagctggtacacatcttcctggagggaggtgaggcctggccgttgagttggggggaggggacgccctcagaccctggctgtgccctgactccttccctgcccacccagtgctccgaggcctgtggcggtggtgagcagcagcgtctagtgacctgcccggagccaggcctctgcgaggaggcgctgagacccaacaccacccggccctgcaacacccacccctgcacgcagtgggtggtggggccctggggccaggtgagccgggctgcggggaggagcagggagcaagtgcttggtggcgcctggtcagtcttgggttgggtgaaggagctgtggagtgtgtgctgtgagccaggctctttgtggccctgtcactggacgaggccccgcccggctggtgctcacacctgccagggagaaacagacaaggaaagggcgcgtgtgctgtggtgtcagggaaggccttccaaggaggggtctggggttgagacccgagggaggagtcagtgatgccaaggacagggatcgaagggacatcaggtgtgaagtctgaggcaggaatgacgagcttgagggggccggggagcccggcaaaggccagcggcagaagggggcgtaagaggggcctcagatgggcaggacaccttctgctgggcctgtttggaactgaggggttcagaaatctcagatttgggccctgagctgggtcctggagtcagctgggccagcgtttgcgtctttgtccgactggctgctgagtgactctgggcaggttgctttgcgttgctgggtcactgttttctcatctgtaaaactggaacagcttaggagaggagggtcaggaggattaaatgaaggaacgcaacgaagcacagggccgggcacagcatgacactggcacagactcagtgcatgtttagggctgataacaacgaagcctggcgggctgggccccggctgtgaaactgtctcctgccctcctgcccatgggctgcggcaggtcctctgccctgtccctcgggcacagcggtgtctcgcccacatctctgcccactgctgcatcagggctccatcccggcgcccctgcccaggcttctcaggcatgtcctgtgtgaggggctcactgccctgccgccccgagggctgtcccacggttctcacgccccttccctctgcaggagccgatcccacaagtgagagtggggttccagcaccaagtgggctctaggaatgggaccaggtgctccaggaggcactgagggggcggctgggagcaaggccaggccagtcaggcacagggcgcagggacggcttcccagaggaggtgtccctgcccccactgctagggctggccctggagacactcattcctcccccgctcccctcagtgctcaggcccctgtggtggtggtgtccagcggcgcctggtcaagtgtgtcaacacccagacagggctgcccgaggaagacagtgaccagtgtggccacgaggcctggcctgagagctcccggccgtgtggcaccgaggattgtgagcccgtcgagcctccccgtgagtcccctgaccccaggctccctgctgaagtgaggtggggtggggagggtgatggggaaatggggtcgtcaaaccattgtgcccacggcactggctggttccatctgtagtctgggctcaggagccacatggccactgaaaatcctgatgccacaggatgccatgctggaggctgggctgtgctgggagtcagtcaaggggagtcccggccacacaacatcccataggcagctgtctgaccttgggggagtagagggagtggccctggcccctgatttgctgtgtgaacctgggtaagctctttctcctctaggtctcagtcttcccacagtgagaccagggatgtccctgaggctgtgtgaaaactgggcctgggtgagtccctgtccccagccctggcctgtccattccctggctagaggactgcctagagtgagcaatggaaccacaggaagggcctcctttccagggtcctgctaatgaggtaatggggtttgaggcaggaagggcctcccttccagggtcctgttaatcccagtggtggggggtttcctggccagctgggtcctggtggaagggcctgaggtagaggtggttctggacacccctgccgccgcctccagcatgtgtgcgtgcgcgcacacacacacacacgccaacacacacacacacagtcatacacttccttcctgcagccccagctgctcccggaagtgctgagggcaggaaatggggtggccctggagtgtcacctaggctcccctcaccagctgtgtggccttgggctccatttccctctcagggccttcatgtgctgaataaaggggctgccaagccccatccttgcataaatgaggtctgggcatgaagcacgcagcactgcgtggggatccaggtggtgctcagggaaggtggctttttcccctcccccacagccactgtcatccccaattgcaaggtcagggagagggcctggggctgaccctgccagtctaaggaatccagaagccgtggcgtgaagagctgtgtcccctgtgctattggctgtctgctccctgcccctaggacagagtcctcagccagggccctcaagctggcattcagggccccctgcaatctccccggtctgccttctccccttgtccaacgctgccttctctacctgtgccagctcctgggcagccctcattcaggctcagagtggcccctgccatgcctcgctgccctgcctctggcatgggtggtcttcctgcctcaaacctcaaggcccagtggcagcgcccccaccctgtcctgcctgccctcagcacgcacccagccagcatctcagagcactcctatgtgctacctgagctgggtgctggcaccacgtctctcacctttatggctagggctggccacagggagcggggtggttatgatcccagtgggggaggaccagatggggcagagaacagaaactgaggcccctgggggcctagaaccaaggacggatggcccaggaggctctgggcttgcaaggtctcccaggggcgggtgtgagtgggctgcagggagtgggctatgggggctggttaggtggctgaactagaagctgtcctaagtgaggagttttctgccatcagtgaacagtggaggggggctgggaaggtgtcttggacttggagacctggaattcccagatgttctgctggtctgtgggacagttggcgggacatgtggaaagctgggaaactcgtgtgtgtgtgctcactgcagtgacacagcatggccacatccatttgctgtggaggtggggttgacagaggagggaaccgaggcccaagaggtgaagcagcttgtctgaggtcaccccgggcgaccaggatgcaggcctgcagatgtgcactttggagctctgcctggagctggggtggaggagcctgcctgctgcctcgtgccctctgccgggcctgggggatgtcccaggcccagggctggctgctgccttcctgctcctcctccccagggaggtctgctggagtaagcagggcccgggtggcagctgggggctgtcagcagtggcagtggcatcaggagcaaggccaggaggctggaaacaagccacttcccaaaatagctctgataaccacggggcaggagggcccagccaagcctcagccctgacaagcacagcctgcagctggcctccctccccagcaggctgggctcagtctctggtttccgctgacggcctgtaaggcccactcactctaggcttcgtggcccacctgagaagtgggaggctggcctgggagatgggaccctgtgactcagaacccgaggctgagtacagcccctgtggctggaggtggtcacggaggcctggcaggacagatgcactggggcagggggcggtggcgggagtcgggggcagaggccgctgcaggctggcaggaggccccgggaccgcagttctgtgccaggatctgtccgggaacaccagggatgagcaaggatggagatggggtggcaaggcgtcgccctgggcaggctctttaacaggcatgtgagggggtcagggtggggtctcaggacctttcctccagaaacctcagcccagcagcacccgttctcgagtcctggggttggccatgagtaggtgggacagagacagcaacagttggagacctgcaactccggttcgggagccgctccagaaactggggctctctgcttggtggggagctgctggagcctccttaaggtggttggcgtagggagccaggttctgggtaccccaagctactggttctgatgcctctctgcccccccactccaggctgtgagcgggaccgcctgtccttcgggttctgcgagacgctgcgcctactgggccgctgccagctgcccaccatccgcacccagtgctgccgctcgtgctctccgcccagccacggcgccccctcccgaggccatcagcgggttgcccgccgctgactgcgccaggatgcacagaccgaccgacagacctcagtgcccaccacgggctgtggcggagctcccgccccctgcgccctaatggtgctaaccccctctcactacccagcagcaggctggggacctcctccccctcaaaaaaggtatttttttattctaacagtttgtgtaacatttattatgattttacataaatgagcatctaccattccaaagcacagcgtgacttcgtcttggatttggagaatcttaaaagtgagaaactcttccccccacccctctgcccaaaactccaccgccacagcacctcggcaggcgtggcttttcacctgctcctctgggacagatctgcagggggcagcgtagaaaatgagtccctgagagcatggcatctggtgaggcacggaaggcctcagaagctggggggctgctccccagggagggctgtctgcagagggtggggttctgggggcaggaaggtcttccgggcaggggcacggcttggcccttacttgctgcctgccttcagctcaggctcccagccttccctggggccccactctgtggtcctcagagacctgttccacagggattgagcccaccatgtcacttgcagggactgccccctggagtggtggggactggggcccccatggggacctccctggccctgtctgttctatctgttgactcttctgcaaaaagcaggcagagaggggaagagcaggctggccagctgtgccctactgtgtccccacgtgtcccttcatctctgtgcccagagatagggctgggctaattgtcactgcctcaggttggcccctttcccaccaccagccccagctacaggttcctaccacgctgatctatggtccagcacctggcacctgcctacccacagccccttcccctcccataaaatctagtcccatggagccagacagtagtgcccacagcagggaacagatgggcatgaaggtgctttgaagagggtcctggcctgaccaggggcgggaggctggggaaggggcggacactgtccccccaggcccaggcccagccctggatccaaccctggcctctggctgtgagccttagactcagccgttgacaatttcttcctcagccctccccctggaaggtgttacgccccttctccaggtgggggacactaaggttcagagagctcgccctgcagcctacaggggtcacctctcacattctactctccagcgtatgacaaccctggacgaaaggtgaatgtagccctggagcctgcatgtggcagccgcagccactcagggctgggtatatgctggggatggaggggacaccactgaaaatcactcctggctgggcgcggtggctcacacctgtaatcccagcactttgggaggctgaggcgggcggatcacctgaggtcaggagtttgaaaccagcctggccaatgtggcaaaaccccatttctgctaaaaatacaaaaattagccaggtgcggtgatggggacctgtaatcccagctacttgggaggctgaggaaggagaatcgcttgaacctgggaggcggaggttgcagtgaactgagttcgcacctttacacaccagcctgggcgacagagcgagactccatctcacacaaaaaaaataaaataaaattactccttaggggctgagaccaagaaacagtatcagaggctgaacccctcggcgatgagcgtctgtcccaggacttggaagggagggagggagcatggccacggcagctgcctgcaggtgcgtgtcctgctgctccccaattcaacatgctcacctcatttcacaccaacaagcccgatcctcagaggaggaactcaaggctctgagaggaagtacctggcccaagggcacatgccctggtgacacaggcccatcctaggctccgactgcccacctccaagctccaggctaccctgagcaggtggaagagggagagggccccaagcaggtcccagtggtggctttgcacagagagggcagcctgccagagttcacgcaggaaagcaagttgctgggcaagctagcgtgagtcccagccccgctgtgctgcccgagggtggaggagcgtcaggcgtgcttcctgtctgtctgcagcagcccggctggcccaaagagaccctggggacccacgctctgagtcacggcttcccaggccttagtcagaacggcccctggtggcactcccttccaaggggtggggagcagggcctgtcgacttgctcctgacccacacaccgaaccagtccctgtcccagctctgccgccgccgctctgctgcgtgactccaggaacccccagcctcgctgaatccacgtccccagaagagaaaagcctgccaggccttggcctgccctgtctgggaatccttgatggagccaccccgaaacacccctatgggaacccctttggtcttcatcattcttgggtgttttccactgatgactgggggtgtccccagtggcagctgggcctgagctgtcagccaagacgggagacaaacaagcctgtgactcaggcagggcatggcacagctggcggaaggaggcatgcctgttctttgtggctgggcggggggttatccggacacagggagtctccagcttccggctttcccacctcggtgcccccagcccacacctgcagcttggccatggttcttggggcctcccaaggctgcccctgctggcaaaggcatcctgatgcacccgccccagggtgagccaagggcagagacacccagaaacgccaggctggaaggttggagagcccctcctcgccccccgcaacaccaataagccctgccccaccctccaagcccttggggtgagccccatcactagtgactataactgaatttcaatgcagaatattatacaaattagtagtttatttcttcctttagtattacagttccaaaacataacttgaaggtcagcacaggagctgctgtgatataaaaggagagagtcacctggcgccccctgcagtcctccagttgcccagcagcggtgggacgctcagtggcacacactgggtctctgtatggcctcccacctgcaaggacttccccgggcaggcccagctgcccagaagccccggaacacacaggaagacaacactataggatggcaggtggggatctgtgcaatacaaacatgtagctagaaaacccaactgaggatctgtctagaatacttccgatatcaatataccgtagttgttgaaaccagaaccgtctccagccgtcagcagtcttggcggctactgtacagctgtcagcatgactacaggcagcacccgaggctatctggggtaagaagtgggcctgcacatcacatcggtgagtcagtgagagtcagggccagagggaaaagcaactcggaggctgaggctggcacagatacacacaagggagtcacacacataacataagaacttgttatataaaatagatatgtggaatctagaaacaccttgagaaaatagcctataaaaatataaactgtagtgagagtgtacaaaagtattaacagaggttcaacccataaaaaaccccatccatttaaaagctggcaattcgcagcagatgtggggagggagctcccctcggtcctggtgcgcgcatttggacaggcctttgggtttcccagctggcagggtcccccttgcaggggccacgggctgggtgttggggtgaaggttcagaggaggaacagcagcttggggcagcccctgtcagaagggccccctgccatggcagccagtggaggccagggaccttcagggcactggaggggacagagcagctctttcctcagtgacccgagggaggggaagtgttagcgcaaaagagtggggcccacagtcctggaaggaggagttggctccgtcccgttcccaaactttaaccaggcggagccgccctctcttgccttctggacacgcatcacttgattccaggcaggagaacctctgagaaagtgtccccagtccctttcctccaggaactctcctgctgtcgcacacacacactacccggcagctgctgacaactgcctggaaacactaacataccaccgtgggttgcagccacgacgggcccctggtcaggtgcatctctcagggcaaactggacaacacgagcctgtccctaaaggcagctcttagccccaggacatggcagtgtgtgctggcatgttccaggggccattggcttggaaagtaaaacctaagggcagctggtgctggcccacgggcccagccccattcctgctgcacctcctcagcagccaccccccaggctgacagctgtcgtttcacgatgggctgaggggtggggtggggggtttccaacacttgattcgagcggactgcaacgcccagctcacaggacaactgaaggagtcagacctcaaattgctgttctcaaagacaatgacaacacccatttttgatgcctgaaaagaggcaaaggcttctggctaaatatagaggccagctccgtctacccagtgaaacattaaccaactccgctaaagacacgaagccggagctcactctagcatgtgctgaaacaccaactttgccgtggcattgctagaaagttgacagcaaaaaataataggaaaaaagtacttcttaaaactgcattacttcaattcttagtctcagtgtgttcgtatcaacagaggatggtttccagtttttttcgggtaatatgaaacattccactgagactgtttctcctgtattttcataacactgtgccagaaaacatcctctcacatctacgcatcagggatggtctagagggattaagcaaaaacaagctccttgctcaaagcctctccccagccttcagaaaggcagtcctctgagttcccagaaactgctgtgtcagaggcaacagtgaccctgcatcctggcagagaacaaggatgcttccaggcagtggtggggtgggcacacatctgggagagctcgcccaagcctgccccaagcaaaaaagtttcccagccccaggcactggcagctggcctcctgcacaacccaggcaggtggaggagacaccaggagcactggccatccccaaggaggccatggttttcagctgtccaagaccgttcacactgcggctgcaccactgccctgcaaagcacccccgaaaacattcctccatcccctcaaccaaggccagcccaggcgtgggcctgctttgcaatatgacggtccactgtttacttggaatcccatcccatcgtacttggtgaatgatttccacgagtcaagaagggcattccacagaatctcatggagccatgtcaggcatggggcaagctggggacagagcagcccagtgatctgcaaacacaggctggccatgagaagtgagggtgggtgtctgggcagccaggccctccccatgcaggctgggagccactgttggaagagttgtgtgtggaagagcacaggctattctagaaatggggcatggctggcagcttaaagccaccagtgggaggttcacgggctttctacagtggccatttctgaacaaaggatgtgcctgcttttctaaggcagccccttttcataccgaccttatgcctgaggcagcaaccctctggcctacaggtgcctgaagcatagtgggcatccttcatagcactgccattcaaaaccacacaccactgcccactatgtacaggagagagaatatggggagatgcccagcaaagcaaggtttcagagggtcagagcaccgacaggctgacggaggctggaaacaggctcttgcaaatagccactggtaagcccgaggatccaccaatcaggcagaaagcgtgactgagatatgtataaccaaaagtatggcacggaaatggctgtaaacagattagacctcccacccctgccccccgcacagtgggaaatgaggaagggcagcctggcttgggacatctgcccagcagatccccagaggccacacacgttacattctggcttttaagtgcactttcaccctttgggcacactttggttgtgaaggcaggaagagcagcgtcccggagcccactcaggtatcctcctcctcgtcactgaccagctcacccttgtcagggctggtgtcccgctcatgcaggaagtcctcacggatggcctccagctcggtcagctccagccggactttctccaagtggtaggcacgtcggttccggatctggcgtacggggaaagggttcaggtccccaaaggagatactgatcagcttcctggcaggacgcaggggagagacaagagaatcagcggcgctccagagagtgctcacacacagccctcacaggcacagcaggtggcctggggcagggtgggaagagcactggccaggctgggggcctgatgcaggggacgaggcccaccttctgcagagaggtgacaaggaacaaaggcccagcaagaggcaggttcagaatgatggcctgcactccagctctgccacatgcttgctgtgtgactgaagtcactgccttttgtggcctctgattcctcatctgcacactggggtaacagtagtgccacctcctagggtgtgggattactcgtgttcccacacataagcgctgagaagagctcctggcacttgcatggtgatggtgggtatgtctgcatccttgggcaggcacgaggcctggcaccgggcacgagtccaggacgtctgtgtcccaggattcattgactgggaatgaacacaggcccaggcagtcctggtgatgactgtcagacctagtcggcaatgtgacaagtgtccagatgcagtctacagagaaatgtgcagctcgtgggtttcacatccccaggtcagggctccaattttcaataaaatgttaaggttatgatccacttgctcctaaccactggtcagtggcttaataaaaacaaaaccaaaagctgtcctgaggcctggctatggatttgtagcactaatgggtcagtcacactggtctctggggatcacaaaataggccagttcctccaacactggggccaccatcttcccctctctggattctgccaggccccagatgctttgtatccaccaacatgggctcatgcgcttccctgtcaaccaaaggcccaacagactcaccagccccaggaaaagctgtgatgaaacagaaatgccccgaaggacttcctgcctgtccccatcagagcaggccatttgctcctgctgctgtcggctgcgtgggctccttttaacacaggcacacacgagggtgcaaccttttatgtttcaaaacacccactactacctggacatgcttaactctcatccagaggcttaaggtcagaaaggccagctttatttaaattccgaattcaccagtgtgtgttctggaacatgggagcaccagagaacagagaacgcccaagcacaggggtccccgcgtgtggatttctcaggttccgcctcctgcctggctctgcagaccgggctgccagccccagcaggtgggaggaggctccgtgtgaacggggcacagggtccccaccaccagtcctttctccccaacagctgtcagcccacagcccccacaaaccccaaacctacggcgcccaacactcctgtgctgcagaacacgagcccgaagtataattcttcatttgctcctcagtcaggagctgacagagacccctcggcccaggctggcacccgggaagccagaccccacctctgcctcaggcctggaaggttcctctgggagatgagaaggtgtcccatggtcagctaaatttgggagacgatgctcagcgccttaaaaggctcctagaagtcctgctgcagaacgtggttcaatcctgtgtaactcccgtctcctgaatgcagctgaccacacaactccctccctgtgtttctgaaggccaatcgctgtgctgcaggactggcctccttgcaaccactagtctgggaagctcattaaaacactgaggctccagcccagaggcgggttatgggcccctgcagtcttgataacagcggggagcctgccaccgccttggcactctttaaagcacctgttggtgtggcgaccccgctttctaaagcaagctgcaggggagaccgtaccgcgagccgctcacaaggaggcgctgcaggaccatgcaaggcccagcagtgtgggaggggccaggtcggcctgcggtgccagggaaggggcgggcactcgccagagccacgcccactcgcctcggctcctcctggcagcgcctgggacccagtacagaactgagggcagcggcgctcccaacactgccctagctgtcggcatgggtgagctcactccctgtcactctcggcaatcctgacccaacacgagatgaacagaaaccccccaggctcaccccaggactcagaatcaaatttcccccgcaaatatgattcccatatccctcctcatttggcagaaatcagggcactcttgttggtgctattagtaagcctgaaactattacaaacacactccccagtaaaagactaaaaatagcgatgacctccaggaagcctggcatggcctcagccagcacctcagctcccattgtccaaatcggctctcagggtcagagcagccaacagctgcggtccaggggatatacggatgagggtggcccagaacaggcaatgaccgtgtggccagggagggttcctgaatacttggctgcccaggccagaaacacagggctcttccaagtcaaggatcacttgagcccgggagtttgagacaaacctgggcaacatagtgagacctggtctctacacaaaaatttaaaaaatagctgggcttggtggtggcacgtgcctgtagtcctagctactcaacaggctgatgttggagcatcactttgagcccaggaggttgaggctgcagtgagtggtgatctcatccacggtaccccagcctggtgacagaacgacatcctacctccaaaaaaaatttttttaaactgagtagacaggtgtcctggtggcatgacaggtcctgggtccccttccagatctgtgaccttggacaggtggcttttcctctggacttcagtgtccccatctgagtgagaaaaggcagtggggacgcagatcttcaagttgaagcagtgtagaagccgcatctgaaaagccatacttggggctccaagtccagcacacagtcctagcagggcccagcggggtggccagggtggcacaggtatcaggtcccaacctccttccctctttgcccactctcagaccaaggaattcatcttctcagagctgctgtccaacctgtactcgcatggggaccagaacacgctgatggaggagttggcagagaaggcacagtggggcggcgagatgctgcgcaagcgccacgtgctgacggaggcacccagcaacatcggtgaacatcaacacgaccactgtcagcacgcccacgggggcccgtggatgactcctggctgcaggtgcagagcatcccagctggacgcaggtaccagggccagcccccacggtcccaaagtcccccaggctccatggctgagcctgggggctcttgaaacaggctccgtgcccaagctggcagatgtgggtaatcatgcctgtaatcctagcactttgggaggctgaggcaggcagatcacttgaggtcaggagttggagaccagcctggccaacatggcaaaacctgtctctacaaaaaaaaaaaaaaaatgaattgggcgtggtggcgggtgcctgtaatcccagctactcaggaggctgaggcatgagaatcgcttgaacctgggagatggaggctgcagtcagccgagattgcaccgctgcatttcagtcagcttgagcaacagggtgagactccgtctcaaaaaaaaaaaaaaggtaagaatggttcaacttttacttcatcctatcaataggttaaagaagagtaaaatggacagatttggaaaaccattttttatttaaaaagagaaaattaggaacagatgaaaactgtcttaagagtatttgagaaacaaaacagcaaatttaacatcagacaaaatatctaaattgagaaataaagttaaaaggtggatggtgtgcccttttaatgtcatactggagcattgtttcatagatacttgttttactattaaagattgattatttagagccgtggtcctcacacattagagtgcatcatcatgccctgcagggcttgtgaaaccggctgctgggcctcacaccagagtttctaactcagtaggactgaggtggggcctaagcattgcatgtctatgttcccaggtgacgctgatgcttccaatttgagaccatgctttgaaaagcactagtgcagggaaatatactacagaatatgttatgaatatactggagaatatgtatatatgttagcttacagatttctgtccagtagaaaagataactcccaaaggtgacgtttttatttcccgatatgattttctttttaagtcagaatcttgctctgtcacccaggctggagtgcagtgggatgatctcggctcactgcagcctccacctcccaggttcaagtgattcttctgcctcagcctcccaagtagctgggactacaagcacccagcaccgcgcctggctaatttttgtatttttagtagagacggggtttcaccatgttggccaggctggtcttgaactcctgacctcaggtgatccacccaccttggcctcccaaagtgctgggattacaggtgtgagccaccatgcccagcctccctataggatattaacaagttttgtctctatctcagaatgcatttcggaatgcccttcctggagcactacagacactgtctctcaaaatgctccttgaactagcttcaccgtgttgctgactcccttgtaaattaaagaaaatatcttatacgtattccttcattatctgtatgaaagtcaagcttttcacattgtgaaaattatacttcaggctgggtgcagtggcccatgcctgtaagcccagcacttcgggaggctgaagtgatgggattacttgaggccaggcgtttgacaccagcctggccaacatgtcgaaccccatgtgtactcaaaaaaaaaaaaaaaatcaaaattagttgggtgtggttgcacacacctgtagttccagctacttgagaggtggaggcacaagaattgcttgaacccaggaggcagaggttaccgtgggatgacatcgtgccactgcactccagccagagccagagcgaggctctctcttgaaggaaagaaaaaagaaaattatactttgatacagtatgctaatataaaggatatgatatggtttggctctgtgtccccatccagatctcatcttgaattgcaataatccccacgtgtcaagggtgtgggcccaggtggagataattgaatcatgggggcagtttctcccgtgctgttctcgtgatagtgagtgagttctcacgagatctgttggttttattataggctttcccctttgctcggctctccttctctctcctgctgccctggcaagaggagtcttctgccataattgtaagtttcctgaggcctccccagccatgcagaactgtgagtcaatttaaacctcttttctttataaactacccagtcttgggtatttcttcatagcggagtgagaatggactaatacagtgtactaataacagcccagacagtagtatacaggtactagtatactttgatgctagaggtattcccattaaggtcaggagcagtatgcgctatcattaccatgatctaacattgttccagagggttttaggtcagcagttctcaactggaggtgattttgccgccctggggatatttgacagtatctgaaatcactttggctgtcacactgaggagtgctgctggcatgtggcaggcggaggctggggatgctgctaaacatcctgcgaggcgcaaacagctccagaacagagaactgtccagccctaaacatcaacagtgctgctgtggagaaagcctggtctagacaaataaaacatgggaaatccattaacatacatgtgggtggataataaactggcatttgccaatggcagtctagctaggaggtccaaaaggagcacctgaaggacagttagattttgcaggggctgcatggtggctcatgcctgcaaccccagtgcattgtgaggtcacattggcaggatctcttgaggccagaagttcaagaccagcttgggcaacatagtgagaccacatctctaccaaaaattaaaaaatcagccagatgtgggggtgtgctctgagagtcccagctgctgaggtgggagtatcactcgagcccaggagttggaggctacggtgagctgtaatcaagccactgtactcaaaaaatattttttttgaaatagggttgttttccattgcatacagggtcttgctgtgttgcccaggctggtctcgaactcctggcctcaagcagtcttcctgcctcagcctctcaaaatgttgaaattacaggcatgagccactccccctggccttaaaaaataaaaataaaaaaataaattacatggtgttatgtggccagttgaaagatgttagaaaacagttgtgcatgtgacccagctgtaaccagttataaaagtatcaggatcattaagaaatgtactatatctggctttcccaagtttaggttcctgatgaaagaatgagatggaccttttcttcctcccctcctcacctccctgcaagaaccaggattgtgcattttgacgggcaggctcttacctctggcaggccacagggggcatgcagagcctttctgcatgtgctttttgggcactcggataaagaccccctgtccaggcctttgtttaggatatttggcccatggagaaatgaggctggaatcacctgggagggatagaggcttcaactggaaggaggagtgacctgaactccaggttgtgggcctacgctttgttcccatgcagcacctcgttagtggtgactgaggcctggaagtcggggaccttggtgaccaagtgttgagtggacaggaggagctaagggaggtgaggggcatctctccagtactgacccctccccatgcccaaatcaatgccctctatcagctcagacacagccccacccagcagcagtgcgggtcaggaagggcaaatgcagtcggcacggatctgctccatagtctccacctcacttcgtctcgggttgaggggagtgagtccccacagcactgatatgatatcctgtcagctgagaacatccagcttgatttagacagataaggtgggacatctctagggcatggtgtgtggagcagtgccatccctctgtggcagcgagccaagcaataaaccagaatgtgcaaaacctgcgtcccagaatcaccattcctggaggaaaagcctatattgtcaagatgcccacaactaaattaacccaaacattccacccagcctcgaaaaaccagtagaactttgacattaatacactaaccctcagttctatacggaaatgtgtaagaatagccaaataatgtaacgtgcggtcattgagagagagaagcccgtcagaacaaatggaaccaagtccagaaacatgtttgtctaggcgcaggatgccagcatgtgtgtcagccagggaagcagaccaggaggagatattaagatttaaaacccagctctgtagctcaggcctataatttgagcgctttgggaggctgaggtgggagaatcacttgagcccaggagtttgaggcagcagtaagctatgatcgtgccactgcattccagcctggatgacagagcaagaccccatctcaaaaaaaaaaaaaaaaagtgctcagatgcacccttacatgaagccacctttggcacagcttccaagactggccaggcctcactcaggaccatgggtcccagccatagctcagtttccactgcctgagtggcacagagtcctcagtccagtctctgttgggtctcagattccccgatcatgccccttctgtccaacctctgccccattatggcctccactgaccacagcctcttccaccttcccaaagggaccactgctcatgttctccagcccacaggagtgcctgcttctccaggcagcccaccctgctagctctgggctctatgtagaagagctgggaaggctggatcccgccactgagttcagtctcgggggtctccacccatgctaggcttccactgatgggacataagtggcctgagggttgtttacatccacacaagagccccatggtgaccaggaatggggttctgagaggttacatgacttgcccagggtcccagagctggctagaattcctgcactgccacatttgggcctcccagttgggggtccggacacccctctgcatctaccaggctgagaaacacgtgtctgctgcagcttcctcccagtgacttatagcagctgcaaatttttggggggccttctacggggcccaccacagcagggagccaagaactcttaacagagccctgtgttctctctctgcccccttcagctccgaactcatgtactagctgctctgatgtaaaaacagaccttggtgaggatgttgggactctggtcagtagcccaggccttcaggaatcaggtgatgtcaatctggagaggaggtgcctgctgcggggagcaagcatgggccacggtcctggccccctgcaggggtagcccctcttccttcccatggtcccatctgaaggcatccagggtagagtgcagtgttcagctgtgtcctggggtccaggaaagccaaggagaagttgctccacctgctgtccaccaggtaccccagcagagaacagcctcagcccaccccagcccagcaccagatcccagggactgatccacctgtaagagggcagcatgagactgcccccattgtccccagagagtcccctcagtcatgggctctgaccagggtgcaggtgggcccagcaggctggcccagcatgggtgtggctgcccattggtcctctgaagagcctcaggggcttgtggcagcaggtgtatgtctgggcttggaagcagaggatgtcccgcagccagaaggcagggggcacttgttttgcattccagtcctctgcaaggacagggaccccaggctctgggcaccccagctctgcccaccctacacccacagcctaccaccatttggcccaggcaagttgccccagctcccacagagggagccacccttcccacttcctgatgtttgcccaccccagtcaagttccattctggaaaaaccctccacatccttgggaaggcacctcctccttgactcctttccagtgctatcatccccacgttcattttctacctatcattggatgcagagacccgcttcttccctgggccagggctgctctggaggcagggaggttgtgaccaggctgtggggtatagcagagcaccgggtatagaccagactccccaggcacacctgggcagagaagtcagagacccacaggtgaatgcccctctttccagccccacccacctcacaggcagaaagagggaggcttcacaaggaggttgaggtaaatagggagcccgggtcacctctgtctgatctcctgccctcctgggacaaagccagaggttggagctgggaggtgttgagagccctggcccagccctggtttcactgatgaggctcagggaggggctgggtcagcctaagtcactgggtccataaggaagggccctttccataacccaggaccctagagctagccgaggccacatccctttcccacgtagaccaagtaggggcatgaactggcttctggcttctaaggccgaggcccagcacacctctccctccccttgcctgcagctgttgtcacacatcaaaagtgctttttttcccccaaggtgctggaggcgcagctccttgggctggaccaggtggccaatccaaacaagtccttgtgtgtcccccaccagccaggaattctcatgccatgcagcagctgggggcactaggataccctgggggattccagggatgagccctccctgaggctcctacagcagcactgccacccccagacctgccaccagctccgtttccatgcagccttcaagaacctggcccctcacacacacctgccccactcctcacacctggctttcctgtgaaacgtggaactggttccacctgggccagctggagaagggcctcaggaaatcaccatttagggggttcgttccaatcattcattcatttattcaccaaatacccactgtccacctttctgtaccaggccagaggtgatgggtcaagcagaacacatgtcccaaggagctttcctctctttagagacaggcaggcggactctcacaccatgaggtgccctctgggctagggggtacccagggctggatgcaggggcggccctcgcccacaggaggtgctggtgggtactgacatggaggccaccagggggtgagggtgtccagacagaggacctagcatgtgcccaggcccagggtgtgaccgggggcaggtgcagggctgctgtatctggaaggcttcctggctctgccaatgataggctgtggctggatcaggcttcatgtcaatttttaacatttaataaattttgattatgtaactaaacattgtgataaaaattgtgaaatataaaagttaaaaacacaaaaaccagcaaaccccttctctccccaagtaactacttcaacagtattttcagactttttttctcatgtatctgcagctataaacttaagttgcacaagatagtatccttccccatattctgttttgaagctggatttttcactcagcagtgaatagaggcaggctttaaacaggccacgcattgtgagggccctgggaaaggagactgaccatgttgctgggtgacctagggcaagtctcgccctcctcagagcctggatttcctcagtccggtgaagggcaggaagggctgcagtaggactacatcagcgcttcccaaactcagaaccgccacgtggagctgtgtgagctgtcactgcacaaccccaggggcaggagcattcttgtcacggcctctgtgagtggggctcctgcccaaaagtgtgctgtgccaacctggggcccacaggaggattttaggcgatatgcggatgaattgattttaaccatttccttctatctgtagtgaatgagaccgattctcaccgggagggcgtgttaaaccacaggtcactgaacccacgcctcagaggttctgattcaggaggtctggggtggcgcctgagaatctgcatttctaacaagttctcagctgatggggatgctgatgctgctggctcagggaccacactttgagaaccactaaccacaagtttctttttattcatttatttaaggcagggttttgctctgtcagctaggctggagtataatggtgcaatcacagccactgcagcctcgacctcccaggctcaagcaatcttcctgcctcacttcctgagtagctgaaaccataggaacatgccaccatgctggattttttttattttttgtagagacggagtttcaccatgttgttcaggctggtcttgaatgcctgggctcaagcaattcacctgccttggcctcctatagcaaaagtttcctttttaagtacatttatttaggttttaaaaatgagttaacttaaagcacatgaatagatcctcaacactaaccactggggaaatgcaaattaaaaccatagagctttgttacccagggggtggtcagtgggccagcagcattggctcacctgggagtttgttagacatacggactggcaatctcacccagcccagctgaagcaaatttgcatttaacaagatttccaggtgattcctatgctctttgaagtttgagaagcactacccgggagaggaatagagattatcaacttcaagcctactcttgtccaacagttgagcaaaagagtcacagctgacctctcccgccatcctcagaatcatctgtggggagggtggggcatagggtggaagaccttcaaagtccgaagagtttgacttttggggctcaatgctgcaggccatagggagccatggaaggctctcaggtgggtcagactctctgacctgaggtaaataaatgacagctgaacattagcgagcaagccctgtctccatgagcagcaccggtggtcctctgagcatgccaggcatgagtgtgcagggagctggtgcaaatacctctgtgtttgggtgagcttctgtgttgtgactctgctcacatgtgtgcttcagtgtgccaagtggctgcacaccccagatctgtgctgcacgtgccagccagtgagggtgctgggtaccaggatgtggcggggaaggaggcgtatgcgtgttgtggacatgtgtgttagcgtgtgcatgccggctgtgcatgctgtggggcctcatagcatgtgtgtgcacaccccggcatgtgcgtgtgtgtgtgtcccccaaccccaggcctgccccacccatgcgtgtgacctgtcatgttgatctgatgctttcagaatcactatcagtggtccctgaggagcatcagccatggtaggtacatgcctcaccgcctgctccatgaacggtgttcctgccccgctgcaccggctccacacgggggcgcacctgggacctcagatccaggctccctgcccctcccttctggagctgcagatttgctctttcctctttctgtcctcgtgctgctggctctctcacctcccttccctgcaagccatgggactcagcgccactgcccaaggcctccatggctgagcctgggggctgttggaacagtctccatgcccaagctggcagacatgggtgctctctgtagtcatcagagagggcagagagctcatgatttatggtgtaggggctgggagcttggacggggttgtgtgtgcggctggactctgaggcagctagaggtctaggaacgtcatcctgggcacgctgtacctgtcgtgcagtctgagtcatgctgccaggtcagggtatccagatcccagcctgggagtgtcaagagtcaaacccactgcagaggaggggtgatagtcagggtcccacctcctctatctgttggcaatccctggtgatctaggataaaaccttaagagtcccatacacacggtcatcccacaacacacttcacaggccaggcagggacacacagcccccttccctccctgccaggtaccaccgcagctgctagcgtgtgactgaaggcagggtccctggcccccactgaagcactatcgccgaccagcaggctcacgcaccttggcctgttgctcctaggggtcgcctgtgctattcagccaaggggaccacagtgcctgctggcccagctgagctccgcctagcgagcccacctgcctctcctgccatggactctccctcttctgcttttcccagcaggaaggacccagcctcagctatgaaacttgcagcccccctcaccccgcaaccagctgaggctcccctcttagacttataagtctatggccagtggcatccggctacctgccctccctgccttccccagggtcccttcagaggaccctggactttctcaccaccagaggggcctctggtactcactccagccatccatcccttatagcttcaccattttggttcaagcagtgttccttatcaggccaggtggctgttgggtggggctccccaagcaagaggtggccctgggccagtgggttggaaggcagggtgaccagagaagagagaagcccaaagcggctgagcattggtctgaagtgtgggtgcactgcctgggtgccatgggagaggccagtgtgtgtgagctggggagggctgccgcagcccccaggcactacctgtgaagctctggcttctccctccatcttcctcccctttcccttccagcccctcttttccaggaacctttgctacacccgcacctgcgcgctcccctccccggccctcccacagctgctgcgacatgcccgtgctctgcgcttgcatcaccagctctctgcttgctattctctctcctattttctctctgct

SEQ ID NO: 5687 - DNA, 70503 bp, Homo sapiens
  DMN gene - 97462809 - 97493311 of chr15; NCBI Entrez Gene ID: 23336; Build 35; sequence includes 20,000 bases upstream of initiation codon and 20,000 bases downstream of termination codon of the gene
aaagaaagacctaatggtgaaaaggcaaaagatctaagattctcctaagatcaagaacaaggcaaagatgtccattttcattatttctattcatcattgtcccaaaggctctagccagggcaatttggaaagaaagtaaactaaaaggcatccagacttgaaaggaagaagactatctctatttgcagatgagatgatcttgtatatagaaaattcaaagggatacataccaaagaaacttattagaataaatgagtttagcaaggttgcagaatacaagatcaatatacaaaaatccattgtatttctatatatgaacaatgaggaatctgaaaatgaaattaaagaaataattccatttatagtagcatcatacggagtaacacaggagtaaatttaacaaaagatgtgcaagatttgtaaactgaaaagtacaacacattgttgaaagaagatttaaagaaatgaaaagacatccatgttcatggattggaacacttaatatttttaagatggcaatactctccaaattgatcaacagatccaattcaattccaagcaaaatcccagctgcttgttttgcagaagttgaaagctgatcctaaaattcatataaaattttctgattcaagggacccagaatagtcagaacaatcttgaaaaaaaagaatgaagttagaagactcaaacttccttgatttcaaaacttactacagagctacagcaatcaaggctttgtggtattgggataaggatagccatatagatcaatgaaatagaattgaaaatccagaaataaacccttgtactaatggtcaattgatttttgacaagcatgctgaggcaatttaatggtgggaaggaatattctttccaataaatagcgctgaacaactgaagatccacgtgcaaggtgtgaaattggatccctacctcacaccataccccaaaatgaacttaaaatggtggatcatacactaaagctaaaactatcaaacttagaaggaaacataggtgcaaatctttatgattttggattaggcaatgattctttagacatgataccaaaagtacaagtaaccaaagaagaaatagataaatttgacttcttcaaaattaaaaacttttgtacttcaaaggatgccatcaagaaaatggaagacagcccatagaatgatagaaactatttgcaaatcatatatgtgataagggacttgtagtcagatataactcttacaactcaacaaaaagaaacaaataatacaatttaaaaatgagctaaggatttgaatagacatttctttctcttttttttttttttaaaaaaaaaacagagtctcactctggcaaccaggttggaatgcagtggcatgactttgactcactgaaacctttgccttctgggttcaagtgattctcctgcctcagcttcctgaatagctgggattacaggcatgtgccgccatgtctggctaatttttgtatttttagtagagatggggtttcaccatgttggccaggctggtcttgaactcctggcctcaagtgatcctcctgccttggcctcccaaagtgctgggattacaggcatgagccatcgcaccaggttgaacagacatttcttcaaagaagatatacaaattgccaataagtagatgaaaagatgctgaacatcattaatcaggaaaatgcaaatcaaaaccacaattaaataccactttctattctctaggatagctataataaaaaagatagacaatagcaagtgctgtcaaggatgtagagaaattgaaccctcatatcttgctgatgggaatgtaaaatgatgaggttgcttttaagaacagtttggtcattcctcaaaaggttaaacagagttacatatgacccaacaatttcactcccagcaataaattcaaaagaattgacatcatatgttcacaaaaaattttgtacaccagtgttcatagcagcatgatttataatggccaaaaagcaaaaaaaaattcaaatgtccatcagctgataaactgataaacaaaatgtattatatgtatacaatggaatacacatgtcacaacatggatgaactttgaaaacactttgctaactaagccagacacaaacggtcacacatattgtatgattctatttatatgaagtgtccaaaaaaggcaaatacagagagacaaagtttaggttagtggttgccaaggatgagaggagaagggaatgggaagtgatagttaaacggaatggagttttttgggggatgatggaagtgttctggaattggatagtggtgatgaatgaacaaccttgtggatataccaaaaaccactgaaacatacattttaaacatgtgtattttatggtatgtaaattagatctcaatttttaaaagatctcattaagaaaaagaaaagtcaagactcagtgtgcgaggaaatatttgcaatgtgtaaccatagaggtacaaaccagagatacaagaaagtacctgtggcctggcgcggtggctcacgcctgtcatcccagcactttgggaggccgaggcgggtggatcacgaggtcaggagattgagaccatcctggctaacacggtgaaaccccgtctctactaaaaatacacaaaaaattagccgggcgtgggggtgggcgcttgtagtcccagctactcgggaggctgaggcaggagaatggcgtgaacccgggaggcggagcttgcagtgagccgagattgcgccactgccctccagcctgggtgacagagcaagactccgtctcaaaaaaaaaaaaaaaaaaaagaagaaagtacttgtatttcacacatataaagaacaaagcaggcaggacgtggtggctcacgcctgtaatcccagcactttgggaagccaaggtgggcagattgcttgtgcccaggagttcgagaccagcctgggcaacatggggaaaccgaactctacaaaaaaatacaataattagctgggtgtggtggtgcgcgcttgtagtcccagctactcaggggactgaggtgggatgatcacttgcgtccaggaggtcgagtgatggcactgccgcactgcactccagcctggtgacgctaccgcatcccagcctggtgatgtcaccgcactagtgacagcctagtgacagagtgagaccttttctcaaaagaaaacaaaacaaagaaacagaaaagcaactcaatgagcaaaagacacacaggcctgcagaaaaatgagcaaaagacgtggacacttcataaaagaggttattaacatagccaataaatatatgaaaataaatgttcagtttcattagtaatcagaaaactgtaagaccctaatcctaacccgactactactcctaaccctaatctgaaaccttaactctaaatcctaccataatggctataatttaaaatttaaaactcttgggacattacccttcctctcctccccagagggaaccacagctcttgctgctactggctggttgtgttttgagtttgaatggtatattcttttgaatctggcttctttcactcaatgttctgtttgtgagattcacccacactgctatgtctcgcaccaggtcattcattttggttactgtgttgtatcccattgtagaatagattatggtttacttattcattatttctgttgctgagcatttgggttgtttccagttctggtctattacaaataacactgctatgtggagtgaaagaagtcagatacataaaaatgcatacagtgtgcttccattccactggctcactcagtctattggggtgtgtgtgtgtgtgtgtgtgtgtgtgtgtgtatgtgtgtgtgttctgagacaaggcctggctctgttgcccaggctggggggcagtggcacaatctcacctcactgcaacctccacagcccaggctcaaacatcctcccacctcagccttccaagtagctgggaccacaggtacgtgccaccacacccagttcatttttgtatttttggtagagatgggttttttccacgttggccaggctgatcttgagctcatgagctcaagtgatccacccgtcgcggcctcccaaagtgctgggattataggcgtgaggcaccatgcccagcttccagtctacggttttaaagggaaaggatggtacctggcagaggacatgagggaggctcttctgtttctggatcctggtgatggcacaagggtgggctcactctgtgattctgtgagtggtacacttaggatttgcaccattccacacttcaatcaaaaccgacctaggaaactcaaaactcacttgagaccaaattgggcaatgtatttcttttgctatccacaagctactaaagccactttctgaagacaggcaagctggagctactccagatggaggctggccatggggcatttgtcatgggtattatttacaggcttgagtattcctcctaggctgccctgctttttggtttacttctcagacatccttgattcatgggctctatatagtacctccttgggtcttcaccccatcctcacagttgctggcgatggcttttccattcttgactgtaagtaataagagctgatagtatcaatgacaatagaatccattcactcttttagggacttcctttactgtaagtaaattactaacaatgatggacaattgggtgaaatgatcgtaagaaaagatatttccggctggatgcggtggctcacaactgtaatcccagcactctgggaggccaaggtgggtagatcacttgaggtcaggagttcgagaccagcctggccaacatggcaaaaccctgtctctattaaacatacaataccaaaaattagccaggtgtgagccaccgtgccccttttcctaatttcattttcacatgcactcccatcctttcaacaaacctatgttgagggtctcttccatggaacaccaaatctagagacccatagtgggcagaacagacccttgccctccaaatgtgctttatcaccctcagcattctctttcctcttccagccccttcttaccatctttccaaactcatccttgcacttgtcatcagcctttgtcatcagctgatgaggccatcagctgcttgttttcatctggggaaccaccagggctcaaaccacagccagagaagacacatgcctcctgaacccaccctccatgctcttaatttccttcccagccccctgtttatcatggatggtctccattttaaacagaaaatcacttcttgtcacctgtcctgtcaaaagtcttctgttaatccagtctgacctggtagccccattgcccagctgtctgtttccaaccttcagctatttttctggaggtgacttagcaagctgcactcactcttctcccctgagagttccccgggcccatggctgcctggggagacatgtgcaagtattaccaccgctcaagatgcatttctcatgatgaggcagaagtgaaacaaagcaagcctgtacctcattttcattcaccaccgaggaattgcaaatgttgtgaaagtgaaacacatttgcattcttccaatcacctaatttatctggatttccaccttcatttgttaaataaaggattcagtgaagcaaaatcaacaaggctttgggaactcttataaaaacaaataaaataaatattgtgattctacaatatgttttgacatattttgtattatctctttatgattctggctgggggcaggaggggaaggattgacaattgctgtaaatcaggcttttcctgaatgcaatagctgtatttcagggacttcacgcttatagaattttagagccagaaacaatttgtatgagttatctattgctgtgtaacaaaggacctcaaatcagcaaatatttattatctcacagcttctgagggtctggaatccaagagtggcttagctgggttgcttgggctccgattctcacatggagctgcagtcaagctgggccacagctgcagttgtctcagggattggctggggctggtgaatccacttccaggctcacttgcatggttgctggcagctcttggttcctcacaggctgtgggccagaggcttcagttactcactggctacatctccaaagggtgccaatgacatggcatctaacttctcccagagtgagggatccaaagcagagagagaatgaccaagaaggaagccatagtaccttttttttttttgagagggaatctcactctgtcacccaggctggagtacagtgccacaatctcggctcactgcaaccttcgcctcctgggttcaagcgattctcctgcctcagcctcctgagtagctgtgattacaggcatgcaccaccacgcccagctgatttttgtatttttagcagagacgggatttcaccatgttggtcaggctggtctcaaactcttgatctgcccacctcggcccccaaaagtgctgagattacaggcataagccactgcgcctggcccatagtaccttttataatccactatcagaagtgacataccaaccaccctaggtacaatgatgaagtaacggcaggagatggggatcactgggcaccgtcttggaggctggctaccccagaatcttagaaatagtggcatcttgttcccttaatgacagctaaggaagctaaggtccgagagttataacctctgagtgagttggccaacatcacaccagaagttaatcaccaaaccagaacttgaacccagactttctatattttaaaacattgcaatttagcagccacatattttactcattcagtgcttaccaaaagcaagaactggactaggcagcatggagattccaggataaagaatacaatcatggtccctaaccacaaggtcacaggagtggtgtggagtgggatataccgaatgagattacccagtagaatggagcacacttcatcagaaagttacaactgaacacccttgacagttcaaaggcaggcctgatttccaccgccaccctcagggcaggctttgcggaggaggtaacatctgagttgggccttgaagtatagatggatttaggcagatggggatgaatggggtggggctaggctgagagtccacgatttaaccccgatgtctccaaatctaactctgtgagcttcaactatggcagtattaatcaaaggctccagctctgagttacccttttggctgctgatgactaaacttcggggctatctggaaggagggccttggtagcttttgtaagaacttcagttgccttggctgccactgacatttttattgatgatgctgacactttgtgatcgagaaattgaaaccagcttcctgaccatagctatcgacgtcatccagacaatcccccaatacagtgcaaaaacaatttcaagtagtttgtgagtccataaattatccttgcctgctgatttagccgcttgcgagttgatgtaggaaatttactattgaggaggtggtaagaggttagaaagggtgggcttgagttgagggcagcatttccccaaccacaggccaggagtcttcaggaaggtgggagtggaggggtggccagcggaggcccattacagaaatgtgttcaatcagactcattgtccaccacatttagaaagcccacaggtgggccgggtatggcggctcatgcctataatctcgtactttgggaggctgaggtgggcggatcacctgaggtcaggagttctggaccagcctggccaacttggtgaaaccccgtctctactaatcacacaaaaatgagccgggtgtggtggcaggcgcctgtaatcccagattctcaggaggctgaggcaagataattgcttgaacctggtaggtggaggctgcagtgagccaagatcacgccactgcactccaggctgggctgggcgacagggtgagatccgtctcaaaaaaaataaagaaaagaaaacccacaggtgttgatgaatgccaggcccatgtaattgactaacgtgtagacggcatcatttgaatgaagggttttgaaattataaagcaagatccattaatgagtcatgatattaaatttgtggcaccaatccagcactaaaaaggagattaaaacattggagggataagtaatgctttgtagaatttttgtttcagttgcttgcatgtgtgtgcaatgaaaaatgtatttccttttgatgtggtcactgacaaaacagtttgtgttttatctactttatttttttttaaatattttatttttggaaacagggtcttgcttgtcacccaggctggagtgcagtggtgatcacagctccctgcatcttcaaactcctgggctcaagcgatcctcctgcctcagccttctgagtagctgggactacaggcacaccaccacgcctagccaagttttttatgtttagtaagagatgaggcctcactatgttgcccaggctggtcttgaactcctggcctcaagtgatcctcctgcctcagcctcccaaagtacttcaaagtactttagaaacataaaactaacatttcaaatgatactgtagatagcacttcttgggataaatgtctcttttttttttccttcgagatagagtcttgctctgtcacccagtctggagtgaagtggtgccatctcggctcactgcaacctccgtctcctgggttcaagcaattctcctatcttagcctcccaagtagctgggattacaggtgcatgccaccatgcctggctaatttctatatttagtagagatggcatttcaccatgttggccaggctggtcttgaactctggacctcaggtgatccacctgccttggcctcacaaagagctgagattacagccgtgagccaccccgcctggccgagataaacgtctctttaaaaaaatcaactttattgtagcatatgtaactaaaatttactattttttttttgagatggagtcttgctctgtcacccaggctggagtgcagtggcacgatcttggctcactgcaagctccgcctcccgggttcacaccattgtcctgcctcagcctcccaagtagctgggactacaggcgcccgccaccatgcccggctaattttttgtatttttagtagagacagggtttccccgtgttagccaggatggtctcgatctcctgacctcgtgattcgcctgccttggcctcccaaagtgttgggattataggcgtgagccaccgcgcccggccaaaatttactaatttttagtgtgcagcttaaggaactagaatgtatagttgtgttaccaccacgcaagtcaagatgtggaagagttctgttttaccaagaaggttcctgttccccttctcagtcagtccccttccatcacctagcctgtcatgtacaaggggggccaacgaatctagggcagaagcagaaggaggggtgagttgatcaatatgtattgaggatccacagcacgtagggctttgtaggtcagatgtccagggctttgggtttactctaaaagaaatggggaggcacgggagggttttgagcgaaggactgatccgatttaggttttgaaaagactatggagaaactactttacatatacacaaggggtgaacaaataaaaaactatactacaggtaatgagagccaggcttctcactgctggagaaagaagttacaaatgagaaataagggaaggaaggctagaacgatccttgtggatgggagttggaggcatcagtatgaacttgtgtgtggacagccagctagatacatagagaaataaatatagacatgcctgtagacacggattacatgtgtgtgcatgtgtgtatgtgtgtgtatgtatgtgtgttgctatcttaacaatagtaaatcttctaatccatgaacacaggctgtctttccatcagtttaggtctctttaaaaatgtatcttaagaatgtttggtcattttcagggtgcaagtcttgaatttcttttgttaaatttattcctaagtaatttttttatattatgaatgaaacttctttttttgtttgttttttgttttttgagatggagtcttgctctgtcgcccaggctggagtgcagtggcaccatctcagctcactgcaagctccgtctcccgggttcaggtgattcttctgcctcagcctccctagtagctgggattataggcgcctgccaccacgcccagctaatttttggctattttttttttttttttttgtatttttagtggagatgaggtttcaccaggttggccagtctagtctcaaactcctgacctcaaatgatctgcccacctcagcctcccaaagtgctgggattacaggcatgaggcactacacccagccatggatggaacttctaaattaaagttccatttacacaaaaataaaaacagtaaatgaatattaactgaatttttggattgtttattgctaatgggtagaggagtattgagagttcccggtatgctgtcgaggtgtggctgctgagaccttcacacttaacgaactgggacaagatacagcagaagcggaggcaggtgaaagggtaaaatcccacgggctcttgagaggtttggaggaaactgtaatagaaggaccgtaaaatcaagtgacttttgctaagtgccactaactcattaagagagaaaatgtcagtctcagatctgttgctcagtgatttacagccaattgtgagagtcacagggcctacttggctgcctttaaagagaccctcaccccctgcaggcagaaggcaaagagaatggaagagcaggcacagcttctaattgtaagagaggctgagttctcattctaggcaagtctctaatgtcaaagccagggctctgaagggaaaggagtgggactgtgagacttgggatgggggtatttggggactgcaggtaagaaccaaggatctccagattcccctgcagaagtgacccactccccctttcaggaatataggcccctgcccccaaccaccaacttctgccagaagactatgcagaggccacaaatgttaggcaggggctttacaaggcaatgccttcccttcatggtccaccagcacctctctcctggccaccagatctgtatctaacgtcaaacctcagcaagcccagctgggaagtactgggccagctcaggaaggaggggaattatacagcaaaggtgctacacaacctgattcatgcatgtcagcagggactggagcggaaagcctgggaatgggaggataggtggtctgtaaggtgctgggtcaaggtgggcttgtgggtcaaggctatatggctggagtatgagagagttgttggtgtgcgggcagtgtcctgcgacaaggattcactccctggcaagggccttgggcagctgctagtgtgctgctggggtagccctgggaagcctgggaaagggatagtacacattaaatgaatgaagtagagatgccaggacacacaatgcaggagggaaggaacaaatatcagagaagtgggcgtaagaccagaaaacccaccaggctagctacgttccttgggcggcctggaggatcctccatctatcacagtgataaggaagcagctggtgaggggcaccaccccactgagaagctgagtggtacctgtcctctggaggggagggactgacagaagagacgctgttacagagctggcctctctggtgggcatgagaagacgcagcagtggctctcaaactagcatgcattcaaatcaactggaggcttgtcaaaacacacaaggtttcatccgcaggtctgggccggggctagagagtgtacatttctaaaacgttcccaggtgatgctgctgttgctcatccagatactagactttgagagccactggctacaggcctagcagagggcggatggcagcccataagtctcataaaaaaggtgagtataattactgttatgagctgcaaagttggaatggccatgggggtggggagtgaactaagggttctacagactcagggatctgagggatctgtgaatcatagaacacggtgttcctaggggaaagataaatgggctgccggcagaaacatccccaagtatatatataatcaaaaacacttctaagccaagttatgatccagttttctgaccctgagccaccagaacacactggctgaaaggacccgacaacctctatggcaagtgagagccttggtccttccccagagcgactgcagccagttaggacgcgagcactcatttcttttcaggatggttggttcctactgtggcgtccaaattgatgcggatacccagggacccatagcaccaccatggcccccgtgttagagtagggatctatgggggtcatgtcatccacagagccctgcccaagacacagcggggtcagaacagcagtctgggctgcagcgacacatccgaggatcactggcatgttactgtatttaaagccatgagattggattggagcagcagcaggtagatagagaagaggtgagtggctaaacgactggtgggtggcaattagggagaagcaggcacttgtgacagcgttgggggaagagagcaacttccccaagctctctggcctccccaggccccgggtctatgaggaaaacggctgtgtctttctcctttctgtgttcccagggcccagcccagcaccaggcacacagaggggactcaaaaactagctttcgagttaccctatcatgaacaccaccaacaaactccacagaaaatgtgcttctaagggcagggagagcaaatatgctgttctttgacggcaaattattctttttttagttcttcagtggaagtgagaagtcttgtccctgttgggaagattaaacaggggatgtttctttgtcacttggggctcttcccaagttcatttgtaatgattatgacatgactttccaaattaagagagggaagttgtgcagcttagattactgcattttttttatgtgacaaatgctatttttgtaccttttgaaaaggcagcctataccccaacaaacacctgctgtgctcctatgaaacagtgacaaatgatctacccacccaaaatagccagaagagctgtgacagagtggggacactgtgggctctgagcaagagtggctggattcggattttggagtgagacggagcatgaagacgctgtgtcctgaggcctttacattctcatcttacttatcccttgtagcgatcctatgagggaggggttatccttactttacagatgaggaaactgagtctgggaggctcaaggaccagctcgtccctgtcctcctgctccctagacccagctggtctcagaccctgcggagctgccatcatctgcatctgtgccctgactcttcagcctctctccctggccttctggagacagacctctgaccggtgggctccatgtgattctgggctccaggacctctcccatgaagatgaccagcacttgctgagtgcggtgtgccaagtcttgtgcaacacgtctcacacagcgtaacgggcagtgtggcaaagtggataaggtaagggttcaaatcctggttctgccactttttacttgcacgggctcgggcaagctgaccaccctgtggctcagcctccacatcattcacctcgagctgatggtacccactgcacgggctgctgtactgattgtgagttcatccacatgaagagctcagaacagtgcctggcgtggcaagactatacaaggactaactctgatggtgggagccaggaggtttccttgtggtccttgcctggcagcatcttcctcacctgggaatggactaatgcttagcccactccaggctactgactctgaaactctgtgtgtggggcccagggatctgcattttaacaagctctccattgaggccaatggacgtgaaagcttagtctttctaacacctctataagaaggtctattttgttctcattattactattacatggataaggaggtgggctcagaggggttgtcatgcctaagcttatgctggtactaagtgccaggatgcaaagtgggtcagtccactccacaccactgtgcctggcccagcccttcccgccagctcgacgcacttccctttcccactggcttcatttcctacctggccaagcctgtcgggggcaagcatgcctctcagtccacaaacttagggaggcagggaataagcacagggtgatgaaaactcaatccccatccattcaaggggttagagacctgatccccttccctagattgcaccagaactgttgaggacttacacagtgctaaggcaccagggtgggaggcccacctggtcctcatgccacccatcagtgctggcatccactagccttccaagagagccctagatcttcatccctacaggcagaggctgggacagtggaccactttggatagttaaccagcttgttcactgcacaaacatatccggatggggtgatcagtgggactgaaatcccacctgtgctgtccttgctgagctatggaagtgggtgcaggacagcctccaccctgaggcagggcatctcttccttagcaccaaggaaccatccacggaccaggtcatgcacccagtgggctcatccatcttcccacaaagggtgccttttcccaatttgcacaaaggaaccttagagacggatgtggccctgctggtgtggccccatgctggtggagtggctcccacaggtctgcggtcctctgccacttccaggtggtgctcaggcccctggcctcactcaggctgggggagatggggtgcagggcgagggcatggaggaaggctatcctgggccatgctgtggcccttccgctcaggcccacaacttccccaaggctacctctgggaagtagggcacaaggggcccgtgggatcgttgcttggatcccacaacataactggggttttgctgtctcctggggctctgcccaggaaggggtgcaaatctcccttcactatgacccagggctgtgcttccattccactccatcacccctccttcaatattttcttgcctctgcggaaacccaacgctactcagccttccttcaggattttctccccaacttttttccagctagaagtcttccccgagttcctaaaatcttggattttggagaccagtcaggccttttcttttcgtctagggcataggcttcccttcaggcagtgagcagaaggaatgagctggggtagggggagagggaagagcagatctattaatcgccccaccccacaataactgcacatgcctgggagccccgtggagcgcaggccacaccgtgccaggtcctccgagtcgggaaagactcgctattcccgcttccccagcccggagcaggggctaatggaaaaggctgcagcccccggcgcgcgcagcctcctgcttcttggactttggtgaaattgtggctgcgggcccgcgctgcttccgatccacggcgccgctcaagcgaaggctcagggggtcccccgcccgaggcggccccagagccgcccctctggtctccatcccggagcagcgcccttccaccctccttgggcggcgctgccccagcggccgggtgttttcaccgccgaccgcgagcttcctaccgttcatccatccgccgcaggaagggggcgcacgcgtcactcgcttctctccaatccggctacatcccggagttcggttttcactggaaacgacaccaccgggggttgatggtccctaaggtgttcagcctgcgaaagagggctgtggttaaaaagataaaaatacactagtgccttaccgggtcctgagcaatttgttttgtattaggtcaattctagaaaaaaaaatttacaggtcattttttttcattcaaagtaaaaactgttttactgaatcccatgatctatctatccagatatcacctgtgtaatctaagctggaagactatatatatatattctattgaatagaaaaatgtcaataagaagtgaagattgcaggacttttatttttgccattaagctattaatagaaatgcatagttgttaatatgttagcaatgtggctttcaaatttttattgcaaaaaataataaagtatacactgctccttatcataaattccaaatagcaaattgattctggcagaatggttttatcgatttttgcagaactctggtgttcctagtgcatttatgattacagttgacaaatgaatgcagcaccatgaatattgattgatatttttgtttaccttagcaagaaagacaaaggtgaaataactgagaaatttcatttattcttcatcatgatgtaacttctttttaaattttttttgtatttttaaattttgttaagacaggatctcactctgctacccaggctggagtgcaacggctcaatcatggctcaccaaaacctcgatctcctgggctcaaggaatcctctcacttcagcctcccaagtagctgggattacaggtgcatgccaccatgcccagttaatttttgtattttttgtagagagggggttttgccatgtccaggctggtctcgaactcctgagctcaagtgctctgcatgccttggcctcccaaagtcttggtattacgagtgtaagccaccacgcccagctatgaagcaacttctttcctgatctggatacaagtttcgagacaccggacaaacatttcctcacgtttttgtgctgttcacaattcaatagctagacacacaacataccactaaatttaatctgcactattaacatactctccactgcttttaaaggctagacaatcaacaaaacatcaaatccacaaaaacaagtcattggctgatttctgtgttgtaaatactcaagctaccaacacgatgtcagtgaatatggagtagggtagtacacattaaatggcatttctatggtgcaggcacactgctcattcataacttcaagagcagatcataggaaaatgcagtgaaatactgaggaagtgatacgttttgaatatgtgtttgctctttttgtataattagttgtaagcttctataattaatttttaataatggctgtgtttaacaagtggttcataaaattctaaaaatttaacagttggcactcacaaacctgtgggagccaaccgcagtgcaccactgccaggctcctgtgacttctggcttccacagcgggaagtattggcaagagaagggaggcttggatgaaggaagaactgggttttcctcctcttgctccctcctgggatccattctgctcctcttttccagcgctctgggcttctccaggctcagccaacaccctaaggcgctaacggcttcttagcttcttgctcttgctggtccctggtgcttcctcatcccatccatccccatcccatcaatcattcccttccctctgagtttgcctctgcttcctggccagaccctgcctgctcaagtctgctcttgtggtcacaactctaatacttctagtcacttcacccctccgagcttcagtgttgtgaggattcagtatgaagcagcaggatattatcctgaaagagtagctgggggtacttcccccctcccacctcccggccctgctagttcctgatcccctataactctttccctaccggggcagctgcatgctggagcagtcaattcctcagggacaggatttacagcagaaatgggggaaagggttttgagtttcaaagtccaagaccctgaagggcactgggcaaagaaagactaatgagtcactgcaaagtgtcctgctgggactcactggtccctgagaaggctctcccaccctgcagggctgccccctgcccagccaggggatgtgggacagcagaacccgttagcgtggggagtcaaagagctgagaacaaacagctgcagcggagtccaggcaactgtgagagccgcccccccgcaccccaatgtcccagaggggcccaggaccggcagggtctccacataggtttgggcgatgacaccacagcagctctggtgtttgacaagcaaaggccaggtgtcagtgtgcacctgggggaatgggaggatggacaatgatggggtgatgggggtccaaatccccctgtcccacaccaaggtgaatgaacccaagcactgaataaacccactttccacccccacttagttttagcagaaaaggacagggaattattcattgaaagatattaatttctaccacctacagaatgggatctccaacatagggtctctagaaaaaggaagggccactttctgccttgcttgtgattggaggctcatggctgtgacaaggagagcactagaagctttgtcagaggccctggaccagcttgctgagtagtccacctttccatgccatctgtaaaatacactaactgctggccctgccatgaggagccctctggccagtggatgaccgtccaggtctcgccctgggcacttgtgttgccacaagttcaagggcaccccaaccaagggtcagctggtttgtccctgtgagccttaatgacacttatactgagaactgtcattcataaataactgccatgaaaactaatgaaatgcaagtgtacaaaaaagagctgtggtttccatggcaattaaactgaatactttcttagggaaatgctggaaagaaacagctgtcacattaggggtgtgtgtgtgagatttgtaaaagttcggggagatgttagatgtctagaaagttctgtacttggagcactttatggtctctaagttttcactccaaatgaaagaaattcgttttggaaaatgtaatgtactatgagggtagcttgtataagaagggcaactgggactcctgtcaactgacatcaagagaagtattttgcacattaaaatactggtaaatggatatatatttatgttttaagttaaaaagattatttaggctgggcacggtagctcacgccagtaatcccaggactttgggaggccgaggtgggcggatcacctgaggtcgtgagttcgagaccagcctgaccaacatggagaaaccccgtctctcccaaaaatccaaaaaaaaaaaaaaaaaaaaaaaaaaaaaattagccaggcgtggtggcgctggcctgtaatcccggttactcgggaggctgaggcaggagaatcgcttgaacccgggaggcggaggctgtggtgagccgagatcgtgccattgcactccagcctgggcaacaagagcgacactctgtctcaaaaaaaaaaaaaaaaaaattaatgcacatgtatgtgtaatgtatatatatgagatgaggcctctctctgttgcccaggctggagcgcagtgccacaatcaggttcactgcagccctgaactcctgggttcgagtaatcctcccgcctcagcctcccaagcagcgcgtgtgacaccaccacgccaggctccatatatatatatatatatatatatatttttttttttttttttttttttgggagagacagggtctctctatgttgctcaggctggtctcgaactcctgggctcaagcgagcctcccacctcggcttcccaaaatgctgggattataggcctgagccaccgcgcccggcccatatcgtttttttaaaaatagaaaagccaccaatctccagggcctcgggtaagaagtcgctccaaaatcgccagcaccacagcaactcaataggcttctatttccatccaccaaggccaggacactcgtatgctcccggacgccctctccggcgtcccttcgctgagcccggcctggctagcccgccaccccgcccgctgttacccgactgcccgcaccgaccacctgcggccgccaaggtgcggcagggggcgctgtgcggccgcagaggccgcgccgggccgcgctctgattggctggaggccgcggccctcgcccaggccgcccgcccagtctgcccgccccgtccgctaagtgcctgggctctcccgctcgcgtcccagtctgcgggcctccggggcagcggcgaggccggagcgtcgcggcggagaggacgagaccgggacaagaccagggcaggagggagccggccagccgcgagaaccccgcacgcccggcaagatgctgtcctggcggctgcagacgggccccgagaaggccgagctccaggagctcaacgcccggctctatgactacgtgtgtcgggtgcgggagctggagcgcgaaaacctactcctggaggaggagctgcgcggccggcgcgggcgagagggcctgtgggccgaggggcaggcccgctgcgccgaggaggcgcgcagcttgcggcagcagctggacgagctgagctgggccactgcgctggcggagggcgagcgggacgctctgcggcgcgagctgcgggagctgcagcgcctggatgcggaggagcgcgccgcccgcggccgcctggacgccgagctgggtgcgcagcagcgcgagctgcaggaggcgctgggcgcgcgcgccgccctcgaggcgctgctgggccggctgcaggccgagcgccgaggcctcgacgcggcccacgaacgcgacgtgagggagctgcgcgcgcgcgccgccagccttaccatgcatttccgcgcccgcgccaccggccccgccgcgccgccgccacgcctgcgggaggtgcacgacagctacgcactgctggtggccgagtcgtggcgggagacggtgcagctgtacgaggacgaggtgcgcgagctggaggaggcgctgcggcgcggccaggagagcagactccaggcggaggaagagacgcggctgtgcgcgcaggaggcaaggcgctgcggcgcgaggcgctcgggttggagcagctgcgcgcgcggctggaggacgcgctgctgcggatgcgcgaggagtacgggatacaggccgaggagcggcaggtccgtgcgcggggatggcgcgctgaccccatacccgctgccgtcgccccagcaccctgcccttgacggcgtggggcagcggccccttcaccaggggcgcggcgtcgcggaccggtagggcccgcccagagggtgcccgaatggcatggggacccggactcggtccgctggtccatcgactcagcgggcgagcgcggggcggcaggtcctagcggatagccccgtcctcgtcatggggttaggtggcagctgctttaactcttgacaagcgtgactgggcgcatcctgataggccaccctgttagctctaggttttccttccattttccgtgctccgtagactcagtagacccagatctaagagtcaaccgagaaacctctctcacttgcagaagtgacggcttatggtagccccgctgtctatagcgctcctcaggggaaaactcaaattaatttccaaaacggtttttattttgccaatatgatttcccagttggaagccgcagttgtggctctctgggcggctgccttgtttgatcttgggaggggcagcaaccctcatgcagaacagagcttgatcgaagatgttttgctcacagcacacgctgacgtcagatctctgcgtagtgtaaaagttgtgggaaagtggggccctttggcaggatgttattacaagtgcagagtgatataaacagttactatttcagggaagcaaaccctctgacaccggcggggtgacacctgtggctgatgtaaactatgcccagtccagccctagcgtttggccctcgccctgccctgcctcagccagaattggaaatattcccaaatcacactatcagtagttctcaaaaggacagatggaaataacatctgcacaatttcacaaatattttaagagtacagtttgcagctgtgagttaaagatttgagactgacttttaaaaattagaagtgagaggaacatgggggttgtcatatggaatgactgcggtgatgtgacaggtatccacaggtgatgagtaaatacctgttgattctccctgggtccccagcactgccctagactttcagtatgcaaagagctacaggctagatgggaaatcatagaatgcaatatggtactacattgggatttaatcttttgagttgtgggttttgtttggcttccgcctcataacttttcaaagtgttctcttggggctttgccatagctagagcagggacagggactgacccagtgtgtaccgatttccacttgtgagcacttgtgtccctttgcaatgacagtggccaggggtctgagttccacaggtcctatactcgttgttgagtgaaagttaaaaagtgccttaatgtggcattcatggagatttgaccagtggttattttgactctccaaaaaggagtatctgtcaaacctactgcccagggaacccctttgtagggaaccctcgctaccaactcaggggtctgtgctgtgcaggcaggtttagaaaatgctgctttgagccacgctgtgtggaccaaatcgtcaccatgcgttcacagccacagctcacttggcacatttcagaccttcaaattctggttccagtgttctttcttagcggcaaagcccttttccccactaatgaaaccttcagtggaactcgtaatgtgagccatatgaaagcagagttcccctgactggaggagacatggggacttgaagtgcagttagaatcctgtgcagccctcctttgacacagggactccagggcccaccggggaagtgcttttcctgaggtcatacctgccctcagagtgaggctgggaccccactctccgtttgccatccagtgatacttctctcttgttggaatttgctgctttttcctaaaagcaaagagcgaggaaaatgtcaataaggacctggtttttttttttgttttttgttttgttttttttttggttttggttttggttttggttttggttttttgagacggagtcttgctctgtcgcccaggctggagtgcagtggctgatctcggcacaccgcaacatccgcttcctgggctcaagtgattctcgtgcctcagcctcccgagtagctgggagtacaggatcccaccaccccgcctggctaatttttgtatttttagtagatacagggtttcaccatgttggccagcctggtctcaaactcctgacctcaagtgatccaccggccgtggcctcccacagtgctgaaattacaggtgtgagccatgtgcccggccattttttttttccagttccaatttgcagaggttttactgcactaagtgttaccagtcactaccttgtccatatactgaatcttccctcagttaacttaagtcaactccatttcaaattgcattccagaagattcagcaccaatcacagagatgctaggaagtttgtgaaagagggagtatggatgatttaaccccaagcctgtaatttttttcgggttctgtagaagcttactatggggagagtgaaaaaatcctaaaaatgggttgaattagtatatggtaataaatatcttattactaagagcctttagcaagtgcttcgtgtgtgccaggtaccacagatgcccttcacaaatattcactctcagtgcccacaccagtgttacgaagtgggtactaatataagctccattttacagaggaggaagctgaggcacataagtcacctgattagtaagtagttaagccaggattcaactcaggctctagtgcctgagcaactgaccgctgggcgtccgtttctctcttctgtctgtttgatcagagagaaacctttaaccagtattcttgcattcatagcataatgataattgctcttcctaagggctagcccgaggtactctgctgatttcaagtcctaaaatgcttttagacccctccagctggctgaatagttttggcattaaaactattttctttcatttctttttttctgtgttccatgtgctttaatgcccccctcccctggaggcaggagctggaggcagcagagggtgctgccacattgtgcccagctctccctgcctctggctatagcttctgtggctcaagggggaagatgcttgctaggattctacttgaggggaaactggtccttcccagatggcccatgcgccttcactgtatgaggcggtagtcattggcctgccccaggcctggcctcagatttgcccgagaagagtttgctgaactgacatccaagttcccaaatgtgatctagatcacttgaagcctgagtgacacacccaggctgcaggagggggcttcagaaaacacttgaagacatttgcgataaagtggagaccagcttcaccctgcaaacacggagatttttgcttatgaaagtgagcccttagctgctgaggctgactggaaaaggcttccaagcccccaaaacatgattgaatgaaagctttttgtagatgggaaggtggggtgggattaggatgggattagctaagggtcagtgctctgcagctgtcctacctggccctgaattctgactctgccgctctttgggcaggttacgttccttaacctgtctgcaattcagtttccccatttgtgaaacgaggtactggaagtagctcccagggtgtgtacaactggttcattcgttcagctaacagccgttgagcatttagtgtgccaagctcagttcttcatggttgcagattcagcagtgaaaaatgccacgtaaaacaaagaaagtcccttgacctgagaggccttcaggtggaaacagcgtgtggtttttcggggatgcctcagccaggctgccggtgtggctagggcacagtgaacagggggtagagtggccactgcaggacttgggcatttactttgagtgccatgggaagccactggaggttctgagccgaggagagttggggcctggctgtggcttagtggaatcactgttgctgctgttttaaaaatagactgagtggactcagggatgccttcagagattgttgcagtaacccaggcaggaagtgctcgaggcttggaccaggggtctcagaggggcccctgcgttcaagttgaagccaacggcatttgctgccagattgaatgtgatgggagagggagaaatcacagtggacttcaggcgttgtggcctgagcaactggaagaagggactttccttgttttacgtggcatttttcactgctgaatccgcagccatgaagaactgcgcttggcacactaaatgctcaacggctggtagttgaacgaatgaaccaattgtatacaccctgggagctacttccggtacctcttatacgctttactgcggggcattggttaggaggacgggcctgggtgggagattcaagttccatgtacgtgtgttcagtttgagatgcttcttacacacccacctggaattgtaaaatataacttgagttcagggtgctgtctgggctaagctataaatacttcgtcggcatccagttcgtgcttattgttatgaatacatttaatttttgtgtgtagctgaagttatcacagtatttaaatcccctggagctctacctttcaaggttgcaaatgacagtgatatttgtgaactgtcccacaggcttgctcagtgagcggtagctcaagtttggctaagagaaaattaattcttttgatactgacagcagcatgcctttcctggtgtggagcaagatttcatcatcggttgtgatgctgcccaaaagttctctaaatagcaaaaaggtgacctctctcccaagcttttgcagcattaggtgaaactgcctctgctcgggtgagatgtagcgtcccgtgtctggggctccagtgcctctgtcctgacccacagcttgctgactggccaagcagagcccaagtctgaagttttattccacagcaggatttgttgtgatttctgcagagaccactgggagccagttaagtcttatattcctgcttccaaacgtcaactaattttcctttgacaatttaggaggagctgactcacatggaaatgtgactgaaactgtacttattccaacttcaacacagtttgattttcctctttgtattttgtgggtgcagaactattctgtgtgctctgggaggagtatcttcctgcacaccccttccacgtgactaggctttcttgacctgctcaggaggtttgtggttggagagctttcatcgtattttttttctaagcagtttaacaacatttgaacttctttgtaaggaataaattactataaatttttaatttgtaatagttatgtcaaatttcctgtagtaggaaggacacacatacatacatacatgcatacctacagcccatcttgtatgagaaccttgtacctgaattgtattccctctaaaacaggggaatgtaggattttgacattgagatttaactctagaatgtgtgaatattgtggctaaattgtggcagtgctgtcacttacatcaagactggcagttgctctttggtgagcttctctgtttgtaatgccagctgtgggatctgttatcgtttttccaccctgggacataagccagtgatttttaagtttacttctttgctttaaaagctaaggggttttaaactacttcaggaccctttatattcagggaacctaacagccatcattggcatagaaatagaactgttatgagaagtgggaatatttattggctgatcatgcattttaaaaaatgataaattctggctgggtgcagtggcttgtgcctataatcccagcactttgcaaggctgaggcgggaggatcacctgaggtcaggagttcaagaccatcctggccaacgtggtgaaaccccgtctctactaacaatacaaaaatcagttgggcgtgatggcaggcgcctgtatacagtcccagctacttgggaggctgaagctggagaatcacttgaacctgggaggtggaggctgcagtgagccgagattgtgccattgcactccagcctcggtgacagagcgagactgtctccaaaaacaaacaaaacaaccaaaaagataaattccatgtgcaatcttgtagagttcattccttggtttcacagacatatttattatggaccctcagcatcttgccgggtgcctttggtgaagggattccagcagcaatgaacataatattccctctcccagtagtcttaccgtttttgaattctacaaagataaatgtttataggtctagcttagtttagttaatgatgttcagaaataatgctacttcccattacaaaccagaagttaaaagtacatggacttatttcaatgtttaaatacttgcttggttaattgttccccagagtaactaacaactaggaataaaacaaaactggaaatcggtgcagctgaagcccatatgtttgtttgagaagatactgtcgacttcaaatagtacattttgaggagggtgatatgatcttgatcatttcattttaaatttaattgagcagctatgtgctgtgtgacttgtatgtggtgggcactggtctaggtctgggattcagaaggccgcagtatctccctgccaggtagagaggcaggtcggggacccggccaggggtgaggggagctgcgaggagcacccaggacgcccttactagctgcactgtgcaattacggttcataaagcagttttatttatttttattttattttttgaggtggagtctcgctctgtcgctcaggctggagtgcagtggcatgatcttggctcactgcaacctccgcctactgagttcaagtgattcctgttcctcagcctcctgagtagctgggattacaggtctgcgccaccatgcccagctattttttgtattttcagtagagacagggttttgccatattggccaggctggtctcgaactcccgacctcaagtgatccgcccgcttcggcctcccaaagtgttgggattataggtgtgagccaccacgctaggcccaaaaagaagttttatatctgagtctgtagtttgtcatttatgcccagaatgcatttctccccagatgatcttaaagtagcttttctaagtgaaacaaaactctgtatcagtttacctgcttattgttggagaaatcatgactttggggagtacatttcagttcaattctgagtgacttatgttttgaatattgtaaaacccctgatttctagtcttggcttattttccatagcgtcttagtgactggtttgaagcactggctctcctaagcagcctgatgtctaaacggtagagatgatttgaataaactcctaagcattcattattaatagagagtctgaacagagaagccagtgtcctatcaaaatgttccacatgcaataaaaaacttccatatggaagagatacaacattggaaaccatcctgcaagtgactgcatgtttaataacgccgggtgtttttctggtctgctaataaccctggtctgtttttcaattcgatcctgaattgttggtaccttcagttcgacccagtaaagctccagttctctgatataaaagtctgtctattctctttagagagtgattgactgcctggaggatgagaaggcaaccctcaccttggccatggctgactggctgcgggactatcaggacctcctgcaggtgaagaccggcctcagtctggaggtggcgacctaccggtaaggagactgtgctgagttggccttgacgaagccatgggggtgtaacttgcacatgaaggaaactggtctagggaccgtagcctttgtggagtcactgtggctttgtgacaagcagagagcagcccttggcatggccaggcaaggagtccgaggccaaaaggaagaggaagagtagggcttgcttaggtcactgagcaggtgtctccagcaagggagtagctgagccgtgcccccttacctagtgtttgtatgttctggggactgctgaagagcttcacacatgtcaacgtgttggatcctaggaactggagactgtgtttacagatgaacagactttgctcagagaagttacagaactggaaagtggagggccaggatgtgttagtgtgttttcacaccgctataaagatcctacctgagcctgggtaatttacaaaggaaagaggtttaattgactcacagttattccgcagggctggggaggcctcaggaaacttacaatcgtggcggaaggcaaaggagaagcaagaaccttcttcagaaggtggcaggagagagagagagctcaggggaaactgccacttttaaagcatcagatctcatgagaactcactccctatcatgagaacagcgtggggaaaattgctcccatgatccagtcacctcccaccaggtccctccctcaacacgtgggggttacaaatcgagatgaggtttgggtggggacccagagccaaaccgtgtcacaggatttggacccaggaagtctgtgtctatctgcttgattgttgctttgaatctcagggctctgatgccaccctgtgtgggtttggccctgaactgaatctcttccaagagattagcatggtgcatgctaatgtaggccaactggctttatgtatcaagatgttgacttgagttcaaggtaaccaactctgatgaaaaggtcacaaagcgctcaaaggggctgggtgctgggtggggcagagaatgcagtccagtccccctgggtgtggcctgcaggccggcggaacagtgctcctcccctccttggcatcaccctcctttcccctgggtgccagtgcgtctttgattgaggtggtgccccttgtttcctggcagctctcatgctcagggcagctatgaaggagccagggtctgtgacgcttacagtggaaggaattttagagacccagttgcccaacttcaggaacactaacaatagccagctttatggcgtccttactgcctgccagacgtggtgctgagttctttgccactattctctgctccgagtcaactctgaggtgggcaccactctcccctcttagaggtgagagagagaggccgggaggttggggctgcaggctggtgaggggcagagccagccaggtctggtgccaaagctgtgccatccccaccaagccgtgtaaaaagggcacagtgcctgctccgttcccaggattgtggaacatgtggcagtggagggtgtgagcaagctgtggaaaccgctttggcagaagagtcaaagtctggtcatctccagtggtgtctccttcacaggtggcagattaaacctggagaggttaagaaggggaccaactcccctggtgaggggtagagcagggaccatccccaggcctagttcagcacatcttgtaggctgcctgtgtaatcttctgatcatgattttttttttcattttttttattattttttattttaattttaattttatttattttattctatttttttttttttgagatggagtcttgctccatctcctaggctggcatgcagtggcacgagctcagctcactgcaacctccgcctcctgggttcaagcaattctgtttcagcctcctgagtagctgggactacaggcccctgccaccattcctggctgatttttgtatttttagtagagacagggtttcaccttgttggtcaggctggtctcgaactcctgacctcaggtgatccacccacctcgccgccacaaagtgctgagattacaggtgtgagccactgcgcccggccctgatcaggattttttgctctaagaatatcaaggtgacctgaattgctttgatgtctattaaaagggtatctggctgatacgttgcttgtagtttacattgcagcctgggccggcctcactgtctttattttctggaagacttacatcagccagggttcatctgagccctcactcccatcagtgaagagggagcagctctatcaggcagcccctggcctgggccccaggaggctgctaaggggtgaggccttcccagggacatggagtccatggaggagccacggcttcaccaagggatgaattgaggggtggtcctggggctaaggccatgagggcctttctggatcccccatttgagagccttgctgccactgaggggctggtggccggggctcagagaaaggggaaaagatgttgccagactggacttcccaaagcccattgttggcattctccttggaaatcttgtggggtgaacagttgcacaattaaattggtagggcattgaaacacacgttgagttagatgatctaaactttaatatggaaaacttgaaaacactcgggctttatttgggggaagaaagcattaatcaggaatttttcatttgtgagtgacagaaactctcctcagactgccccaagtcagaaaaagaatttattactcatatacctgaaagtcttgtgctggtctactctgtgttatgaaggaataactgagactggataatttgcaaagaaaagaggtttattttggcccacagttgtgcaggctgtaccggaatcgtggtgctggcatctgctcctggtgaagcctcaggaagcatacagtcatggtggaaggtgaaagggcagcaggcatgtcacatggcaagagagcgagcaagagagtggggaggtgtcaggttctttttttttctttttgacatggagtctcactctgtcacccaggctggagtgtggtggtgcgatcttggctcactgcaacctctacctcacgggttcaagcaattctcctgattctcctgcctcagcctcccgagtagctgggactacaggcacctgccaccatgcctggctaattcttgtatttttagtaaagacggggtttcaccatattggccaggctggtattgaactcctgaccttgtgatccacccgcctcagcctctcaaagtgctgggattacaggcatgagcccctgtgcctagccggtgctgggttcttttaaacaaccagatctcatgtggactcatagagtgagaactcactcattactgagaggacagcacgaagccattgatgagcgatcccccccataacccaaacaccttcctctaggccccaccttcaacacggaggtcacatttcaacatgagattaggagaagacacacatccaaaccgtatcaaatccttagtttcaggtacagctggtccacatggcgggatggtctctctcttctggactcttcccaccacgtggctgggtggggcccgaacagctccaggcttagggccacccagtctcgtgcccgtggtcatcctctcggcctctccatctctgctgggtcatgttcctgcctctgagcccatcactggccagaggaatgtagggctctagagctttgggttggggtcccagcctcttatgagtcacatggactgagactggggtggtgggagttaccccaaatcaggcactgttctagggcagatgccaggcaggcctggaaaactgacttctgtgtgttaggtaatgccccatgccagatgaatcttttccctgcagggcagttggatttttctattttctttctgtaatagttctctgagttagaatcaggaaacttattttgtgccttgcctttggaattttgagctcttttcttccctacttcgtcctgccccctgttctccatcctgaaaagccagtgtaaacatgggcatcctgcctcagagtccggggcctgcctttttggtagggtattcacaagccacggggcctgcctttttggtagggtattcacaagccacgggcccagcttttcagggcatcgatcgcgagccgtttctgctcactgtcagcagtctgtcagccaggacagagtttattttgtctgtctatggctggcgtttccctaacccgattatggattgatgtggccatctcctaggaatttaggagctactcgtgctttcaggggagcaagcgatggatttcactgtacctctttctgctgtccaagtttgcatggggaaaatgaggaccctgccaggagcttgcctgacaggccctgccccgctgcagactcccagccctgctgggtaggatcgctgcaggcctcccgcctctgtgctccggtatagtctcggagatgcccgttgacgaagaagacatacagatggttgaatagaacccattcttttgtataagccaaaaacttaccatttttgaaaatcaccagtgcatgtctggaagacaaaccctcgtcatcctcgatgtgagtcttgctcagtagtctgcactgctccgattcggaggacaggtgtgaagttcctgtttgtgttcgtggacttgcgctcttctgacccttattctttaactaaagtgctcatttgatctctgcaaaccttgacccacctgtggtggccgttgccccagaattgctgagttgactgtcatcatcctgtggcttattggttctcattcacatgcaagggaagggactgtggctctttaatgcttaaagcacgttttgctgggatttgtccattgtcccaaggactctcaaatgtactgaacacctcccaacccagatctttggcccttctaggtgactgtcacagggaaggagcaacattaaagtaatcataaaataatataattgtatacttgtaatttccagagagacttgcaatttataaataaatatataatttaataaaataaacataagataataaaattaaaacaaagcaaacctccaagagtctaagactggggttttgcctttggccagtgcatggccagggaagctgctggcagctcgcctggcaggtgaagatgagatcgagacctctgagcatcctaagacgtgcagcaccatccctccctttcctcctgcattgcgggtggcagtgagcgggagctgtggggctgggcgtggggccatggatactgagaagagaggagacacaccctgcctgcagctggcaccaggctgtactggctcttgtctcctgtcaagagtagcggcagttgtgtggggctcgaggtactgatccatttgctgtatgatcacagggtcttgcctggagtgtgcgttttattgcactagcagcagaatggtaagggaaacatgctcggggacagggagggactgcacctgcgaatctcccggccctcaagattctgatgaggttagtgacaggtggaaccggcacagtggtttcaaacctccctggatgattgtcaggtaccaccagggtggagaatccccggtccagggcctcacagctcacagggcggcagcatgcgcattgtgaggcattgcaagtttgttgggaatgcagaatcttgggcccacccagacatactggaccgaagttggcctcgtaacaaaatcccaggtgattcgtgcgcacactgctgttggcagagtggcccaggcgcaggtaagtgctaggtcttctcacagcagcctggaagacaagatgaaggatgggttgatggaggagaggggaagcagtcacagtgggaggcggggcttgcaccaggacccacgcgccagtctgggctgcttgcagttgcatgcggcagtccccttagagctgccctgggcctgtccgaggtcacagaatcctgtggagccatatggagaggccacactttagagaaggtgatgacttggattggacagaatctgaagctctgaacacccgagatgagcaacacaactcattcctcttaagtcttgttttgcagagtcatgtcaaaatgaatactttatctagttttcccaacattttgttatgagaatttccaaagataagaaaagttggaagaataacgaatgctccatttgagttctccagtgaacatgcgactacatttgctttatctcatgactgtccaccccgtgtcatcatccatcttactttctgatgcattccaaagtaggtgccattatctctgaccatgaatgggtgacagggagtgacagctgccttctgtttagtacctaccatgtgctaagcgctttgtagactgtatctgcaatttttatagcttcaccaaagaagctttttttccatgtgatgacacccacgttcaaggaggttacttaaaacgttacacaactcgtaattggagagcctgagattttaacttcaggccttcacccaaggctgttccctccatgccctgttgaacgtggaattagaaaggagctggatgtactgggatgctgggcagatgatggtgtggacctagtccctgtcctcagtggtaggatgatgatgtgtcgggtgcagtgggagggaggctgatgaggcacgcagggagggcttcctgaagaggcaatgcttgattcttgtaggaagagaagctggaaatgactttttggaaagggttttccaggcagagggaatggccagggggaggccctgaggactgtgctagtgtggtatttatgacagtgcccgtctctgggcagctgggctttgggggcgtgtcatggagggccacgtgtgatggatgggtaagagccacacctgccctcagccttctctggagacaattgatatgcaggatacgatgctgggtgggggcctgcaaagacactgccagtgtgggcttcacgtcaaggaacatgggctgtagatgaggcagcatggatctggggagcctgctacacagcagggaacctgaagagctgcaaaagactccagcacgaggcttctggtgatggggagggagttgtgagaatcaggggaggcttctagagggattgaagattgatgaaggtcttgaaagacggggaagtgtgagcagacacagaggagagagggagagggactatagggggtagtgtggcaggagggacacagtatgttgaggtagaaagtcaagcatattccagtaatggaatgcacattcctagggggtagtgtcgatggttcactgccccctaacagggaaagctatccatgggtcactgccggatggagcacttcagactgaggtgatgagaagagatttgcaaagggatgtggggtttgggcctttgggtggtgggggaagtggggagatgggaattggactggcagaaaggaatcaggaaggagctccgggtgggcaagtttgaataagagaataagttgagggaggaacttgcaaggggagtgaggagaggtctgggaatgaggcagagtgcaggggccttgaacgctgggaagctgcagtggggctttctgtggcatgcaggggcagtcccagggccagcactgtggagggggtaggcagtgctggggaggcagctgcaggcagagtgcaggaggcctgcagtgctggggtggatggggtgtctgggtggctgcagggaggcttccagagtttcctgcagtcgctagcgcccaggcgtgcagacctgatggaggtggctgtggtaggagggaggagcctgaggagctgagaggtaaggaagtatgagagacacgtgccgctgtcactcgctgcaggctagcacagagtcggtaaagcaggtgcttgtgaataatcggatgataattgatgatgagatggtgaaaaccctagcaatgtccagaacctgcagcgccccaaaccctctcactgccgatgtgaagacctggtccagatcctacagagtgaggacgtgcagaagcacagatagaaaagaaacagcttccccatacacacactcagcatagagcccaatgatcagcaagaagctgttagaaaacagaacctttcagaaaagatactcaatattgaaacaacaaatgcaagaatacccaggggtagacagtgcagaaaccacagaacagaaggatgcagaaacagtgtgcgtgacatgaggcccatcctaggtttctggtctggaagacagacaacgcggtctctgtaagaatccagaaagaggcttttgtgttctatgttttggggatgaaagatatgataattgttctaaatttcacctgaaagaaaaaatggaaagctgggtcaaaatgatttttcagtagaaaaatcgaaggaggccttacctcggcagataggaaaatgcaatgcagagatttatttactgcctggggcctttcaggcaaaagtccttttaaaaggttaggttagaaacaacaacatcaaaaaatattgtgtgtgctgggaagggcatgggaagcttcctgtttcttctttctgatcccagttggcagaagcagcgtgttttaatggagaaaaatatgatgtctctggtctccatgtagactgctaatgtagcaacacagaggactcctaatgtttacatctcatcattctagtgatatttctgattgctccattattttttaggccacctgtaccttttcacgtgtctattcaaaggaaaacgtttcttaggggtttcctcaaggttttgcagaagtacattttgtttttttaagttagttcccacctttttttggaagacttataaaaatgtgtgaacactgagacttatctagttactagataaaatacttgaagtgaataaaaatcttgtagttgtaagaatagagttgggcatggtggctcacgcctgtaatcctagcactttgggaggctgaggcaggtggatcgtttgagcccaggagttggagaccagcctgggcaacatggtgaaaccccatctctacaaacgatacaaaaacaactatttgggtgtggtggcacgtgcctgtagtcccagctacttgggaggctgaggtgggaggatcacctaagcccaggaggcagagattgccgtgagctgagatggcaccactgcactccagcctgggcgacagagcaagatcctgtctctacataaataaataaatagaatatataattgaaaggatcgaccagtacctttggttgctggtcaaataaatgagttaacattcagttaactataaaatacagatggtccacagtcccttcccttgttgactcattttagttagctggaaatcagttttctttggaggatgtagaaggaggtggggacgacgtgatcgctgatgtttagtgagctcttactctgtgacagccatggttctgagaactttctgcttcttgattaattcctactgcaaacctgtgagttctctccatttcagaaatagggaaactgagtcacagtgggtttgagcggcctgccagggtcacagaactaggaagtggcaggtctcagatctgaatccagacatcctgactccagaactttgtcctgcgcttgcttcctctctgttttatgagtgatgtttgtctctgttgattatctggtttttttttttttcagtctctagtattgacctagagatggctctgggatgtggttgaatactgaccccagaagcgatgcccggaaatggcccagcactgccacgttacctcctgttatccttcctgtgaagccggtggtctcacctttcccgttcaggtggcgttgctggtcatgggaatggaactcccctctgccccctcccttctgttccctggtcttcccggtgactgaccagccacgggcccgcatctggggtgacccaggcagtgcgtccactctgtgtggagcttggcttcctctgtcgcagtgaggagtcgagggaggcggctctgcggctccttctccagctccggagcctccctttcttctctgcacttctccacctgctgtttgctaggaagcaccccgtgaatcacccacaggccccggccccggccccagcaggctcccgcacagacacggcttctgggaacatcctgacagtgcctcatttatggggctgcacagagcagtggccttgtgcccacggtgctgagtcacggcggattgttcagcaattccattaggataatctatcccagacagagagccttgccttggagcctgctcaggacgccgggtggcccattagggcctggcgcctggccagaggccacatgacagccggcttctgcactgtgggtttgtcctgggctccttaatgaggccagggacttgagttttcttgcacttttgcttattttcctgcataaggggccaccaacctgtggagctgtgtgaaatgcccacaatagcccatgactcaggggattggcatttctcacagtccccgaggcttgggggcagatttcctccaccgctctcaaaataaccaggtttgattgcagcctcagagaacatgctacccatttcttaaagtggtacgaacctattccttaaaaatgtcccttgcagagctttagaggaagtcgtggtttctggcttctcctcagagtcttgttgatgctttcgccgtgtagtcctggggctgtgcggaaggagggtggctgccattgggctggatgtgctacccaaagcatgaactcaatggccagtgcccagccgggtgctcacagatagtaaaggtgacatgtgtcgctgcctgctaggatccggccattgagaagggacacagatgagggatagctccttctccagcaggagcttcttacttataggagagctctgcagggccattttggatgaaatcaccaagagaatttattttcattaatatggcccggagggtctatctgtaggatttgtgctttctgaaatttgtgtgcaataccatggtctctggcctcactgggaggcctagtggtatcgcaggggagggggctgagagctcaggctgcctgggtttgcatttttctctttactggtgagccgtatgcccttgaccaagacgctgtctctgcaccccagtcttctcacctctagagcgaggatgcagccacaggccctgtgttgggggtggcttcgacggtgtaagtacatgagtgaccacaatgcctggtgctcagtgtcagccagggatggtaaaggcctagaaaggggaagctgtggggctgtatcttgtcccctgaacccagccagaagccccacgcagggctggtgcctgtttcgtgtgggtcctgaactctatgaaggtttggtgatgctttggaattctggaagaggagcagatgcattccctttggagggtggggaagacgtatttttccctggacagcaacataccttccgttctaacttgggcagctcaagggagaggccccgtggtacccgaggttcacagctgagccaggccgggaggatctgaactagaacctagtctttctccccacgccctgccctggctcctcagctgcaggacgccaccccttctgctgccgtcatcctggggtgcagagccttggggcctggcttttaccccgaatgttcctctgattatatagacctcagaactttctcagcagtgaaagctgtttgcgttcctggaacctacaatgcttggtcatgagggcgtgggattaatgggttggtgtcctgtttcctggcctctgccctgagcgaagggctggggctctggactcgggcctctgcacatgccccgtccacacacaagcatcccgcagtcactgcgccggggcaggcccgctgtgtgcgccttcgcgagagtgcctcatgcctcctttgctttcttccagctgctcacagggctctcgtgttcatggggctcaccatgtttcaacagatggaaatacaactcagtgcagtttgtccaagctgccaagtccctgctcgggtgtgggcaccctgctccgtttttgtgcccagctctcagccataagattggcatttctcagtgggctcttgttctggatgccttttgccgtgtgcagtgtatttcttggaaccggagttagtgacttcacatgttgctctagcaactgagaaactgttgcacccagagctgccagcagcccaaggggtcttcgcgagtgactggctgacaggcatcccggtgctaagcccctcgccagcaggctgggtctgctgggaccactctcctcagctctgggatctgaagcagtagacgtgaacaacctaatgaaacttctataattttagaactttggcgcagacatagtcaaagaaatcaccttgttgggtacttctcaccattttattaaaggagataacaggatgccaatttggatgaagtgaggcccctgggggtggcatggggaggggctactgacggggggcgctttagcactaccttttccgtctgcctgccttctacttctttttgtcgtctccaaggtgaccccctggaatgcagtttgaaaccacagatgcagtctggctgccttataagtgtcagtccctgccgtctcctggtcagccctctgcaagctgcccccaccagctgtgactccaggaagaacccagtggggggtgtagctgctctggggccctctagcctggggcccacatctctccagtgcccccttgctcctgctcctcttcaccctggactgagaaagctttctagaagggcttggctcgccagtactgccgaagccctggcctggtcattttgttcactgggctagtaggggttgagcgccatgctggctgccagggatgtggcggtgagcagagcaggtggcctggcccaggtctgctgaggctggtgggtgggcttgccagccctatggtgcagccctgcccaagtctcctcttcaggtagaagtcctaaaacaggtgacactatggtcattggccgcataccacgatacgttttattagaggcacttcttactctttcgtttcctaatgaattatgtttgtaaattatttttacagggccttattggaaggagaaagtaatccagagatagtgatctgggctgagcacgttgaaaacatgccgtcaggtaagtaaaagctaatgacttgacttagctttaggcatctgaactgtttattctgtggctagatagtaaagcaccatcatcgggaagaacgggttagatatggtgtttagataacaggagttcatctctcatttaagtaccaaatagattttagtttagtgtgacataatttcaattatgtgaatgagaatgtttgggaaggtgcttgataaacttggtccctctctcgacaggatgcaggagcggaaggggctaatggcactgggcagtgtgagggcgagcaggagtgcacctgaacttgtgtttcacacccctggaagggacactccttccatttccagaccaaggggttatggttgttacacctgtagagggaggtatggccttggatggcaggcaggcagcactctggaacctgctaccctaacaggaagagagatgggaatagttacattgtttacaccaccctaggttgttgtgagcagctcaggaaaatgtgtcctggtgccttgaagactaccttattgaggccaagagcctcaggacagggcccatccttcctatggctgcagaactgacataagatcattaatgttcattagaaagatcctaagaaactgagggataacttgttttttaaccttttaaagccctatagaatcttgaagagctctggctaagcaagtgtcgattaaattacgtatagaatgttgagttcacaccttaggcagcagcatggttttagtcttcattgtttcttttaggcaactcatggatttgacatgtcactgggttgagaagaatatttgggttctagtcatctataactggaagggatctggtcttagacaacatgcagcaaattttctttctaattttgagagtaagtttgaaaaaagcaaaggtgttcatggaagggtaggcattggtcaacctgcctggcatcagttaacgtgtgacatctataaaacaagaattaactccccagatttcaaggtttacttagttacctacatttttaacctgtggatacctaagtttggacatccatcatgtaacctagagagaggggagaaggaagaaaagggcccaggagctccgaggaagaccaacagtctaagccagggccttgctcaaattttcccagttgtgattttggggccgagggagagcacacagaggggctaacagctgttgctgttaacttgcttcattcattcattcattcattcattcattcattatttttcaagcttcttgaaggaaatagagacttaatatttgtaaactaaatttattctggcaattacatattatgccaaaagctttagaataaaaattactagttgggaatttttattagacgttgagcttctagatagttctgttctgttgagtaaatatacagataagttcctaagtagtgaacttatcaatacttgttagtgtgcttgtgtttcttttataatattgcataaaataatgttggccgcttgcccgctagccggtggacctaaacccagtctgtaatcttccatgtttcttgttgaatcttaactgtaaatgagatggtccctgcactattgcctgggggttcatcttctgggacttctcagttggatcagtaggatcagttgacctgaaaagaggagtcttgtagaaaatgtcctggcctggtctctttcctgtatcttgggatctgtgcaaaggaggcctctggccttggctccataagggagagagaaagccctgtccccgctgagccagctggggtgtgggtagacaccaggggcactctcggggtggacggtgctcctggctgcgttctaaccaccagctgccattcctaaagagcggtttcccctgctggggtgtggacaccccaaagggtagcactgtctgcaaacagcctggagcaaagctggaagccctgaggactgcctcccaacttcaggatcatgacactaagacagaccggggtgtttctgcactggctccttttcagataagtgttaaatgtaaaataaaagatcagaaagcttaaagaagttaaattctttaatacttgttggcccaatatggaaatcagtgaaacagaagagtatattaaatagtggaggataatgctatttggtgtttaataatgacacactttgtaattacagagctcttctctgctacagtaaattaaacttacctcaaaaagcagaaattaatgatttcaaaatataagattgtgaaatttcagccacaaaaacgagcacctctgacctctctgggatatgcattgtgctttatgattaatgttaagatgagtgagtattttaatatcagtaactggagaaacgtgttaggctgaagtatttgtagtgctacattttattgtaacaggattttgtaaactgccaaaaaataatttgggcaccaaatataacttatctttataatgagctttctgtggtaacagtgtatatttattatgatggaatgggatttggcctgcaacaatgcttgtagatggaaaagggtaatgatgactgtcattttaatgaatgctttgttcaatttctacagaattcagaaacaaatcctatcactataccgactcactactacagagggaaaatgaaaggaatctattttcaaggcagaaagcacctttggcaagtttcaatcacagctcggcactgtattctaacctgtcagggcaccgtggatctcagacgggcacatctattggaggtgatgccagaagaggcttcttgggctcgggatattcttcctcggccactacccagcaggaaaactcatacggaaaagccgtcagcagtcaaaccaacgtcagaactttctctccaacctatggccttttaagaaatactgaggctcaagtgaaaacattccctgacagaccaaaagccggagatacaagggaggtccccgtttacataggtgaagattccacaattgcccgcgagtcgtaccgggatcgccgagacaaggtggcagcaggtgcttcggaaagcacacggtcaaatgagaggaccgtcattctgggaaagaaaacagaagtgaaagccacgagggagcaagaaagaaacagaccagaaaccatccgaacaaagccagaagagaaaatgttcgattctaaagagaaggcttccgaggagagaaacctaagatgggaagaattgacaaagttagataaggaagcgagacagagagaaagccagcagatgaaggagaaggctaaggagaaggactcaccgaaggagaagagcgtgcgagagagagaggtgccgattagtctagaagtatcccaggacagaagagcagaggtgtccccgaaaggtttgcagacgcctgtgaaggatgctggtggtgggaccggtagagaggcagaagcaagagagctacggttcaggttgggcaccagtgatgccactggttctctgcaaggcgattccatgacagaaaccgtagcagaaaacatcgttaccagtatcctgaagcagttcactcagtctccagagacagaagcatctgctgattcttttccagacacaaaagtcacttacgtggacaggaaagagcttcctggggaaaggaaaacaaagactgaaatagttgtggagtctaaactgactgaggatgttgatgtttccgatgaagctggcctggactaccttttaagcaaggatattaaggaagtggggctgaaaggcaagtcagccgagcagatgataggagacatcatcaacctcggcctgaaagggagggaggggagagcaaaggtcgtcaacgtggagatcgtggaggagcccgtgagttatgtcagcggggagaagccggaggagttttccgtcccattcaaagtggaggaggtcgaagatgtgtcgccaggcccctgggggttggttaaggaggaggaaggttatggagaaagcgatgtcacattctcagttaatcagcatcgaaggaccaagcagcctcaggagaacacgactcacgtggaagaagtgacagaggcaggtgattcagagggcgagcagagttattttgtgtccactccagatgaacaccccggggggcacgacagagatgacggctcggtgtacgggcagatccacatcgaggaggaatccaccatcaggtactcttggcaggatgaaatcgtgcaggggactcgaaggaggacacagaaggacggtgcagtgggcgagaaggttgtgaagcccttggatgtcccagcgccctctctggagggggacctgggttccactcactggaaagaacaagctagaagcggtgaatttcatgccgaacccacagtcattgaaaaagaaattaaaataccccacgaattccacacctccatgaagggcatctcctccaaggagccccggcagcagctggtggaggtcatcgggcagctggaggaaacccttcccgagcgcatgagggaggagctgtccgccctcaccagagaggggcagggtgggccggggagcgtttccgtggatgtcaagaaggtccagggtgctggtggcagttccgtgaccctggttgctgaagtcaacgtctcacaaactgtggatgccgatcggttagacctggaggagctgagcaaagatgaggccagtgagatggagaaggctgtggagtcggtggttcgggagagcctgagcaggcaacgcagcccagcgcctggcagcccagatgaggaaggtggagcggaggccccggctgctggcattcgctttaggcgttgggccacccgggagctgtacatcccttcaggcgagagcgaggttgctggtggggcctctcacagctcgggacagcgcactccccagggcccagtgtcggccactgtggaggtcagcagccccacaggctttgcccagtcacaggtgctggaggatgtgagccaggctgcaaggcacataaaactcggcccctctgaagtctggaggactgagcgaatgtcatatgaaggacccactgcagaagtggtggaggtaagtgcgggaggtgacctaagtcaggcagcgagcccgaccggagccagccggtctgtgaggcatgtcacgctgggtcccggtcaaagtccactgtccagagaagtcatcttcctaggccctgcccctgcctgtccagaggcatggggctcgccagaacctggcccagcagagtcttctgcagatatggacggatcagggaggcacagcacatttggctgcagacaatttcatgctgaaaaggagattatttttcagggccccatttctgctgcagggaaggttggtgattattttgcaacagaagagtcagtgggtacccagacttctgtcaggcaactccagttaggccctaaagaagggttcagtgggcaaatccagttcacagctccactttcagacaaggtggagttgggtgtcataggagattctgtacacatggaagggttgccagggagcagcacatccatcaggcacatcagcattgggcctcagaggcatcagaccacccagcagatagtttaccatgggctggttccccaactgggggaatctggtgactcagagagcactgtgcacggagagggctcagcagatgtgcaccaggccactcacagtcatacctcgggtagacaaaccgttatgactgaaaagagcaccttccaaagtgtcgtttctgaatctccccaggaggatagtgcagaggacacatcaggggcagaaatgacatcgggtgttagcagatcctttaggcacattcgactaggtcctacagaaacggaaacctctgaacacattgccatccgtggacccgtgtccagaacatttgtgcttgctggttcagcggactcccctgagctaggcaagttagcagacagcagcagaacgctaaggcacattgcaccagggcccaaagaaacttcgtttacctttcagatggatgtgagtaacgtagaggcgatccgcagccggacacaggaagcgggagctctcggtgtgtctgaccgtggttcctggagagacgcggacagtaggaatgaccaggcagttggtgtgagctttaaggcctctgctggggaaggagaccaggcccacagagaacagggcaaggagcaggccatgtttgataagaaggtgcagctccagagaatggtagaccaaaggtcggtgatttcagatgaaaagaaagttgccctcctctatctagacaatgaggaggaggagaatgatgggcattggttttaataagcagaaacattttgttttaatggcagcctgttggcgacgtgccaacatccaaaggccttaacttattttaagaggccgagggagtctatgaaaatctccccttttttacttttttaaagagtactcccggcatggtcaatttcctttatagttaatccgtaaaggtttccagttaattcatgccttaaaaggcactgcaattttatttttgagttgggacttttacaaaacacttttttccctggagtcttctctccacttctggagatgaatttctatgttttgcacctggtcacagacatggcttgcatctgtttgaaactacaattaattatagatgtcaaaacattaaccagattaaagtaatatatttaagagtaaattttgcttgcatgtgctaatatgaaataacagactaacattttaggggaaaaataaatacaatttagactctaaaaagtcttttcaaaaagaaatgggaaataggcagactgtttatgttaaaaaaattcttgctaaatgatttcatctttaggaaaaaattacttgccatatagagctaaattcatcttaagacttgaatgaattgctttctatgtacagaactttaaacaatatagtatttatggcgaggacagctgtagtctgttgtgatatttcacattctatttgcacaggttccctggcactggtagggtagatgattattgggaatcgcttacagtaccatttcattttttggcactaggtcattaagtagcacacagtctgaatgcccttttctggagtggccagttcctatcagactgtgcagacttgcgcttctctgcaccttatcccttagcacccaaacatttaatttcactggtgggaggtagaccttgaagacaatgaagagaatgccgatactcagactgcagctggaccggcaagctggctgtgtacaggaaaattggaagcacacagtggactgtgcctcttaaagatgcctttcccaaccctccattcatgggatgcaggtctttctgagctcaagggtgaaagatgaatacaataacaaccatgaacccacctcacggaagctttttttgcactttgaacagaagtcattgcagttggggtgttttgtccagggaaacagtttattaaatagaaggatgttttggggaaggaactggatatctctcctgcagcccagcaccgagatacccaggacgggcctggggggcgagaaaggcccccatgctcatgggccgcggagtgtggacctgtagataggcaccaccgagtttaagatactgggatgagcatgcttcattggattcattttattttacacgtcagtattgttttaaagtttctgtctgtaaagtgtagcatcatatataaaaagagtttcgctagcagcgcattttttttagttcaggctagcttctttcacataatgctgtctcagctgtatttccagtaacacagcatcatcgcactgactgtggcgcactggggaataacagtctgagctagcaccaccctcagccaggctacaacgacagcactggagggtcttccctctcagattcacctggaggccctcagacccccagggtgcacgtctccccaggtcctgggagtggctaccgcaggtagtttctggagagcacgttttcttcattgataagtggaggagaaatgcagcacagctttcaagatactattttaaaaacaccatgaatcagatagggaaagaaagttgattggaatagcaagtttaaacctttgttgtccatctgccaaatgaactagtgattgtcagactggtatggaggtgactgctttgtaaggttttgtcgtttctaatacagacagagatgtgctgattttgttttagctgtaacaggtaatggtttttggatagatgattgactggtgagaatttggtcaaggtgacagcctcctgtctgatgacaggacagactggtggtgaggagtctaagtgggctcagtttgatgtcagtgtctgggctcatgacttgtaaatggaagctgatgtgaacaggtaattaatattatgacccacttctatttactttgggaaatatcttggatcttaattatcatctgcaagtttcaagaagtattctgccaaaagtatttacaagtatggactcatgagctattgttggttgctaaatgtgaatcacgcgggagtgagtgtgcccttcacactgtgacattgtgacattgtgacaagctccatgtcctttaaaatcagtcactctgcacacaagagaaatcaacttcgtggttggatggggccggaacacaaccagtctttttgtatttattgttactgagacaaaacagtactcactgagtgtttttcagtttcctactggtggttttgatattgtttgtttaagatgtatatttagaatgacatcatctaagaagctgattttgctaaactcctgttccctacaatgggaaatgtcacaagaatgtgcaaaaataaaaatctgaggaaaaaacccacattgttcctaaagagaatgaatattttcagtagattttgatgtttcctttaaactctaagtaaagaatctgtgtgtttacatgcatgtttttagggtagcagagaattactgggcagaatatatatgaaaagttccagttctctaattcctcacctgaatcggaactcaatattgggagcacagagctagaaagcctggcagacagagcataagccaattggcttgtaatcaaatatacactggacaatttgtggtaaaaatgtcatcatcacagcctgaatgactagtggcagtaggacaccaccaaccatcccatttgggatggagaggtttcttgggatgtggtactttgagtgctaaaaccaggactgtcctgggcataccaggacagttggttaccttataagtgcaaattggagggttaaccctaaggcatggccatttcttaggggcttgaaaaaactgaggtagtttgagacaaaggaatagctagatatctttacccgtttgtaaccttgtagccctttaccaaaaatagaaaaacacaagtagctatagtcttcctctcgttgaagtcaacagaattaacagatgggagacattggagggaacattcctaaattcattgcttcctggggtggggtggggtgggggcgctaaattttaaaaatgtgttttagtttttgtgattccaagctacgcttcaagaagtacagaaaggaagaagtaacatcagaattcacatttatttcaaaaactcggcatggactctcagttcaggctgctgtaacagaaagccgtagcctgaaaggcttaaacaacaaacatttatttcttacagttctggaagctgggaagtctcaaggtgccaacagtttcatttcctggtgagggctctcttccgggcctgcagacggctgtcttctcactgtgtcctcacatggtggagagagagatcatctctctggtgtctctccttataaagcactaatcccattcatcagggctccaccctcataacctaatcacctctccaagaccccacccccaataccatccctttggggattagggcttcaacgtgaattgggagcatatgaacattcaccccttagctgactccacccatgtcaactagataggacacacggtgagtagtgacatcttacacgtttttagcacactgctgatgtccgacaggcctgggtctgggaccagtgtgtaccagcaagcatggtctgtggggtcagctgtcacgctcctgaggaagacaatggtccctgcttctctccaccctgtcgtggctctactgagtttattttccccatcaatactggaggtggtgccctgcacaaatggccccagggtggttttgatgtcccactgggggctggaggggagggccctgtgctgcaatctgctgtcatagcaccagcctgcagcctcatggccacagtctgtgggaccaggggagggaggggaagggacatcactgcccacacctgcacccctacccctgggtgttccatccacctcgatctggcactggatctcctcgttgacatcgtggaggaaggcactcaaagcttcctgttcgactttgccatcctcacacgactatggcctccttccagggggctgaagactgctgtgtacacgatagtgtgccaactcaggaagcagctccaggtggcatccaggtttgtcctgcctgcagtggaggccacaggagggatgcgaagcagcagggagtctgcggtcttccccccgcagcctccggctagcctttcttttcactcccttacacctgcctcctgggccccaggccaagtcaggtgtgtcggcctcctgcccctcctactgggctctttctcaaaccccttttcaggctccgaagaactctgaggcaggctgcactttgaaaacacatgctgacagcagcgtgttcaggtttccctttattagcgttttcttctcatgttattctcaatccctattagcctcctataagaaaggacttcctgaagttcactgtccagatctaactccacacctatgcaaggagctgtgtgtacaagcagatgccgggctgactcctgcacagggcgcactgaactgttgaagagaagtttttcagccacagtagtgctgatgggtaaaaattcttgttggcaagaaaaaccacttaggtgatagaaaactgctttatagcatatatcaccctgaagggcatccactgtcaaaatgtggcccacgggaggcttatggtctcactgttgcatgttggggccaacagttggccttggaaatctgtatcctgactgttgaattccattttctaggcggaggtgatttgtacagcaccctaaatgacagtgcccaggaatgtcctaggctttttcagggtgggggcctcagtctgctgttgtgccgggccgggccttccccagcagggtgtcctgagggatgctggtgcagaaggccactttggcttttgatgcctgccttggcttcgaagcaaccttgggggccctgcagacaagcagagggtggggtgagtgtggtgcccctcagccccccacaccgttcccatccagcctttgctgcccagcaggtgcccagacccatttatgagaagacttggtaggggctataaatgagaggagaattgtagcacagagcataaaacatgagatgttttcctcccatcttttatttttttaattttttttttttcagacagagtctcactctgtcacccaggctggagtgcagtggccccatctcggctccctgcaacttccgcctcccaggttcaagcaactctcatgcctcagtctcccgagtagccaggattacaggcacatgccaccacgcccagctaatttttgtatttttagtagagacgaagttttgccatgttggccagtctggtctcaaactcctggcctcaagtgatccaccgcctcggcctcccaaggtgctgggattataggcatgagtcacctcgcctggcccctcccatcttttaaaatcacctgtgaccatcctcactgagctgaggccctcaacccttagctggcttggtgagcaggacatgggtgaggaggatggtcagggttgcactggaggcctccctggctcgccttccctgccctcaaaggggatggcgccctgctggccaggttgtgtctgctccgggctgtggccctgtttccctgagcagactcaggcagccctggggctgctctctgcggaccaggctctgtgaggtaggccctccacggcagagcgctgggcctctgctcgggctgagaaaggacgtaggggccagcctttaaggtcagtcagtgaaccttccggctccagtcctgacgggcatccgagggcagagggaagccggaagcagggctgcaggaggccacagggattcccggggccctccccctgcagcaggtgccttagcctgcaggggctggtctgcaggaagacaacatccagcatatatttctgacttaaaggatgaattatttttaaatacctgggcaaggaagatcttttacaactcgggtttcaaaggaacttgtcctttatgcaagttatgggaagtcagcaaaacattccagagaaggttacacagaaccttctagaaccagctttctcttgagattctgaatggaaagggaatgagatagagaaagtgtgagggacgccaactcacgtggacagcatgcccatggcctgctgggtggccagagtccttttgtcctgcggtccatataagagggtctggatctggagacactgtagaacaccaagcagctatcatgaggctatggaagtgtcgctgagagcaggaaactaaggtctcccttgaatgagagaaagatgacctcattcttaggccctgctgtgatggaattagcatgctcctgggatgtctcctagtgactgacctttggtttggatgttctgagggatctaggcaaaagtgaacagttttagcactatttcacaaaactctctgtgactatctgtatgcaaaaaatagatttaaaagtagtatttttaaaaataaaggcaagaaccttggtactgaccagaggatgggctccagtttctatttttaaatgtggcccttgttatagcctggaaaagatttaaaaaaatagttttgttttttttgtaaacacatactctacttttattaatatataggctgtctatactcttgactacacagcaatgtcttagttattaggaaccaaatattcagcttatggactacccagggctggctttggcttgatttctcccttctgcttactttaagtcttgccatttgattgcttgtagtaggctagggcaaatcaaggagaggagaaagattaaagttgtgcccaaaatggccaaaataattttgagaaagaatgaggtggagaggtggaggaacttgctttactgaatgccaaagacccttttatttttttaaataaagtaattaagacagcatgtttgtcacccggggtagacaaaaagaccagtggaacagggcagagagcccaagccttgacagatgacagaaatggccttgcgggattggtgaggaagaggtgggctagtcaataaatgggtactgggaccgctggttttccaaatggaagaaaatggatcactaccccaaatcaaacacaaatattaagctcaagaaagatttgaaggactaagtgtgaaatgcaaaacttggagcttttagatgaaaatactggaaaatatatatatatatattttttgatggagtctcactctgtcgcccagactggagtgcaagtggggtgattttggctcactgcaacctccacctcctgggttcatgtgattttcctgcctcagcctcccgagtagctgagattacaggtgcccgccaccacactcagctaatttttgcatttttagtagagatgaggtttcaccatgttggccaggctggtctcaaactcctgactgcaggtgatccacctgccttggcctcccaaagtgcggggattataggagtgagccaccatgcctgaccggaaaatacgatcttgaggtagggaagtatttcttagacaagatctagacaaagcaaaagtgaaagactgataaaatgtaactatgtgaaaacctaaaatatttgtgcaccaaaattcaccataagcaaagtagaaagacaagccacgctgaggaaagattcttgcagtgcacagaaatgagaaaggtttaacattcagaatacatgaagaattcctataaggtaatgagaaataccaaaccaaaccaaaacctctcaatagaataacactcaaaagatataaacagattattcaaagagttgaaatctgatgaaataaacatgcttaatctcattaacaaccagaaatacaaactaaaacctcaatgaggtaggtaccatttcacccaccagactgcaaaaactaccaagttttgttaaagatacaaagcaacaagaattcttttatatattgatagtgggtattcaaactggtatagcccctttgtaaaacaatttagcaatatttagtaatgaatatgtaaactgtgatatgtatatattatatatgtatgtgatatataaatgtttgatatatgtatgtgtatatataaccacatagatgaatctcatgattacaaagtcaaggggaaaaagaaaacgacagatgaatgcatataatatgtattataatttaatatgaagttttaaaacatgcaaaacaaaaccatagtaaaataagaagagcatgggaatgatatcaaatttaaaaaagtagttatctggggatggggtaggtatagaggggacttcaactggatgggtcatgttttatttcttatactgaatggtgagttcaaaggtctttgttatgttatccatacttttctgcataacaaatgtttcataatatattttttaaaaatcggatgaattgtgctacataaatagcttgagtaaaaaaaagtgtgagggtttggggacttactactgaagcctgtttattcattctgatctgccaaccatttttaggtcttcaagaaaattaaaatgcaagcagccaaatgcctttgtctttataagctgtggaaactataaaaactgaatgtttcagtctgaggaattgagaatgtggttgtcctttgaaaaaagtaactatcagatgagaatatgacaggattttttaaataacagaaaatattcactatttcttagtcatttgactaagaaatatacaatatcaagaagtagtaaactcttcttgttcttttatttaatgcataattcaaattctacaaaggcaaggatccctgtccctctgtccaacaagcccttgactttctaaatctgcacggggaccttggcctggcctaggcaatgggctgagctgctcattccatggggttgagccagcattgctttaatgctttaggctgttgcgaccctagaaatttaggaactttgactaagctccgttgctctgaggggaggggatgcggacatgtttttgacagccatggtacctgatgaaaacccttccagcaccctgcttgggttacagctattggaagcctgggcacactgggcctggcagaggaggtggtgctcagaaagggccacagagcaagagaggcaagatgcttcccccactgccacccatcagtgagaggcccctctctccagggttaacacttcttaccagaatagactctattttgcccagaaataccttcactcagtgtaaaagatcagggctaattttaaagccacccaaacttccctgtgtttatatatttatgagtgcctctgatgcagctcattttgagaggtgatgttgtcactgcttgttgttaattcattcactgtggcattagagttttactgacactgtaacagttagttgagacagtctgaggtctcagttcactctgccttaacagattgccttcaaaatctaatactcagaggaatttccatcctacccctttggtgactgaagctgctgctccttggcccctcattctctagggaaagacatacagcattggtgaatatgcacgaatccccgggaagaatgagaaggcaactgacagtgcttatgcaaattctcagtgtctactaaccatccccacctgttacaaacccgtgtgctcaccattttccctgggagcattttcactactgtgttcgtagagaagagtggagttaggagagaagattctggttgggtcaagagatccttttcagtaatcaagccctgaagaggggcgccccatccttaccctacccctagacctttgtcaaaactcaactcttcctggtattaatatatttgtttcccctaaggttacttatccttactaaggagatttgtccaaaattccagctgaagtgaaaagagatgcaaaggggtgtcagctaggagacagaaacaaatcctcagcccctcactaatcccttgtgtgattacagtgtaagagcaggcaccaaggctggaaagaatggtcatccattaaatgactactcttccaaagatagctttttaaaacagcaaaataacccattatggacttctactagaaaatgttttatatagctatatatttatctaagaaacataaattgaatttttcagcattctgctcttcttagctaaatttacttaagcatttttgtgtgaagtaggtgttttgattcttttgttaaaaacacaggcattgacagagaggaagtcaataaatgttaattgaacctgctggagccaggcattgtaaacatgtcgctgagctaagtaaagaactcgccaaaccttgacagtagaacattctccaccataaataaagatattctgtgctccccagattcttctgagaggcagatatgctgctccttgtaatcagccactaaggggtgtttctcacttttctttaaagtgaacaataaactgaactccggagtgtccagatgaattttaggagccattcattacattgctcttattctctttgattttatatgcagggttgtgagaagtcacttgtgtttctactattccttaaataccaaacagggagcttttctttcccttgcaggaagacaaaagggaatgtctgcttttataccagcctgcaggctgtccctaaatggggccatgtttgtcttgctcaccactgtgttccagggccttgcacaacccctggcacacaagccgatgcagcagttgctaagtgagtgattaaataggacaaacatgtaagctggggagattcttacatggagcctgtagactccttaagacacagttggaccctagggctccagtggctcatcagttactaaaacctctgctagggaagttccactgggtgtgtggtgtgaaaagccctcgaaattccagtccagccttcaacaggagaaagactgccgttcactatttgctgcttactcttaggactcattcggaaagctggggtagttgagagacaatcttaagcatttgatgcaaactttcagaattctttttgacatgaccttgaggtttgaaagctaggagtctaaggagcccaggagccaagaaacctgggataggtgccgtcagttagccatcctcctagctgtggtggctttgcgctaacacccttcccagtgtggacagaggggtggctcagtggcagctatgggatcagggttaggtgactcggtatactctcatttaaaaacccacagtaattcaatacccaaactcaggaagaatattttctgtttcagggggatctgtgaaaatgtgcagctgttactcagggccattttcatagcagcatcctgcagaagtagattggtggtgtctcccttcctcccttaacctcctgcctaaggtcccagaattgcatcataacatctattgaggaatttcagatgatgaaggtactgatggaacacatcctatttattcatggagacagtgcagcaaggactgcaactagagggtcatttaagttacaaggctacgtgactccataatagaaaattgagaaaagcatactattcatttctggtaaggttccaagccaggctcgtcaagctattacttgtattttgtacttacatgaaatgaaaaagctaaagaaaggtaaattttaaaaaattgctctaatgctgaggatctgaaatcactactcttctttatacacattatccaatgccagattacgtccacgggggagaaattactcagaaacttgaaaattgtgcttctgttttcatgtcaattctcaaggctgatactaagagaaaaggtgacttcggaagccttactacgtggaagcgtgaaatgtgataaatctttcaagaaatacaagtacgctttcatttaccaaccattacaaggcaggcagaaatgactaacttgggggaattgaaggaataaaccaaaacgtaattcatcagacaggcttcccctacagaaacacagtcaggggtagtgggtggtttttctgagccacccagataccagcctcatcctggctggacccacgtctttgtccacattcgccacttcctgaagcagctgtctgctgaacaccagcaacacgccaaccctgtggctacttcggggatggagtggagaatgggcagaagtgagccttgctctcagggggcttctaatggagtagcggagaaagatatttttaaaatacataaataaacgtgtcaacaacttgtgataagagctacaaaagaaaaaagaagacgacggggctatgaatgaataccggagggccttggtggtggtcgatccagggtagctgggccagcagaggcctatgtgaggaggtgacactggagtgacacctgaggactggggagtcggcaggtgaaaaacaaacagggcaggatggggatggagggaggtggtggggatggggggaggtggtggtggtggtggtgggctcacagggagaaggaattccgagtgtttgtttgagagaccacacccctgcatcctctttctctcagtctatgtctctctctctgtctctgtctctctctctttctttctctgtctgtccctctcacccagccctgcagctcccttacttgaagggacactgatcctatgaccagaggactgaggcactggtgggtgggtagggagcctctcatgagagaaacacagggaaggtgggaagggagatcctgggctttgcagggaaatgggagatgaaggagaaagggggtgaggtccagccactgccacccgcacaactcctcagagcggactctttcagaaagctcgccctgagtatctcctgggtgccagccctgggggcatggatgtcatccttgctgtctccctcactcctcacctccaggttgccaagtcccatgggttctaatgtccttatcgacatcccttgactcccccacgactttgttccatcccttggctactgtactggagcaggtaccaccatccttctccacaacgactgcaatacaaatatttagaaaataaatgcattggcaggacttgctattgagagaaatcctgctgtgtacccacatagaaattatggtttctttttcaagtggagccggctttttgtataaaagctggatctgcctatttctaagccagccaaggcaagggatgcagactcctaaagctgggccttctgagctgccttctcttggcaaatttccctattacatgcagctcagcgatctggtttagtccttcccgagtctgtgctatccacaccagccatccctgaccattggtctttcaacttgtttaaagttacactagatttatgtaataggagcttttgcttttccctccatccctggccatgtacccataaactcactgtttccagcgaagctccgaaaaaccgctagagagcctcaggccaggatggtctgtccagacccacagttctgcacctctccagaccttgtgggacaattgatgaccctctgaggcactgtacactcactaagccatggtcagagttctgatgtttgaggagcttttccacagcaaatgtagccttgtcagtgggcagtctgtgtacactacaaatcaagtgtttttccaagggatagcaaacatggaggggcactgtgcctgggtgccatagctgggcgggcccaacctcaggagggtgccttttccccacagctgatgatgccagggaggcctgtggtcaggagaactggaattcttattaccacacagcctatagtgggcaaggggggctccacattcattcttgttttttgagacggagtctcgctctgtttcccaggctggagtgcagcggtgtggtcacggctcactgcaacctctgcctcccaggttcaagcaattctcctgcctcagcctcccaagtagctgagattacaggcacacgccaccacacctggctaatttttgtatttttagtagagatggggtttcaccatgttggccagtctagtcctgaactcttgacaggtggtccacccacctcggcctctcaaagtgttgggattataggtgtgagccacagcgctgggcctccaaattcattccttttttttttttttttttgagacagagtctcgctctgtcacccaggctggagtgcagcggcgcgatctcagctcactgcaagctccgcctcccaggttcacgccattctcctgcctcagcctcccgagtagctgggactacaggcgcccgccaccacacccggctaattttttgtatttttagtagagatggagtttcactttgttagccaggatggtctcgatctcctgacctcgtgatcctcctgcctcagcctcccaaagtgctgggattacaggcgtgagccaccgcgcccagcctccaaattcattcttaaccaaaataagaatgaatgaccatgacccctttaacaattggctctcattctcatataaactgatttacaaacatcttcaagtcacgagtgcttgaagagtctttaagcacacttctcaacccaagaacaagactttttatatgcaattaatgtcattatgaccctctctttaaaaaaggtgggctgttgcagtccaacaatgggttagtcaaagatgattataaaaatcaggatcaaggacaaatgaggctctacacatgaaaacaatgtggcgtggcgtggtggctctgtgggaactccaaatttggcttggaattcctggtatatgcaggacaacaaggaaaacaccaaatatgctaaagggaaagtaaaacaaagggggccactgatggaattacagggaacggattctaacataaggtatggccttccctaggaaggctgtgtgtattggcctgcttggaggaatggctggaatatagcagggactcaatagcctattctccagtcttgacttatgaccacataagaccttcctaggccgggcatggtggctcatgcctgtaagcctagcactttgggaggccgaggcaggtggatcatgaggtcaggagtttgagaccagcctggccagcatggtgaaaccccatctcaactaaaaatacacaagttagccaggcatggtggcacatgcctgtagtccaaactactcaggaggctgaggcaggggaatcgcttgaacccgggaggtggaggttgcagtgagccgagatcgcgacactgcactccagcctgggtgacagagtgagactctgtaccaaaaaaaaaaaaaaaaaaaaaaaaaaagaccttcttagcgttggctttcttgcctacagcctctgaataaaaactacgttccaactcctttcataaaaagattcattttagtgggctttgagtttttgaagaaaggggtcacatacaattttttgtgtgtggaaatgtttaatgcccacagctaaagtagtgaggcagtggactgaaccctgctgaagatagtacctaatacggaggccagatgatgactggacccaaatccgacttcagtgttcttgggctcagtatactcctgagatgttcctgatccatgaagccgccttcaggaattctttctgcagcctttcacctgaggaaaacgttggtgacgatgaccattctagaatacaatcaggtttctatgttgtacaagtaggtgaacttttgctgtggaaatttccacctggagccaagagaattctgtgattttcccctgcaggcagatgcctttaaaaggcagatcaataatacggtttccttttcggtgatttaatcctgctgtgtgtgtgccttgtttcccaggccttcctgttttttgtttttcaggcctgtgggtccatgcctggaccattcagtgcaggagggtacatctggaaaagccactgttcagtgggttcctgctgctgagttgaaaacttaggggaggcagctgctgctgtgataaacacgagagccaccgtcgccgggtggtgcttagctctaggaactgctggcttcacagagctgaatgctaaatatggcatttgagaaactccagtcagcagcagatgtgaaaagcatgtttcaagtccccatttgtgccctggtattcacagagcagtcagcctgtcctcacataggtacatgtggaggagtggagatcagaactgcacgcaccacagtgcacaaccttcagaaatacgagtgcccatcatttctcttggagcctggcaaacaggtgtctttaagatgccaatgccattgttttcaggactgatggtaaacaaggccaaaccaaaggaaaaaggggtcaccagcttctaccacaggctttggggtgatgcacccttagagtttcttgaagccgagctgatttttagcctctagggtggcagtgtggcccagagcagtgattctcagcctccgcctgggaaactggccaacatgcagaaccctgggcacctggcccctgccccagagactctggttcagaaggtgaccctgatgcaggggcttaagatgcacacttggtgagccactggcatagagtaaagagtcgggccttatataagaacaacctgcccacagaccactggcttacttctgggagcctcaggccccttctctgtttaacagagctatgcaggtctgacctgcggagttgctgtgaagatgaggaatgatgtatgagccacacctggcagcagtgagtgtacggtggggcacatggtaccagttcagtcccactgggagccagcagtgacagtgtgaaggtctgtgtggtcctgttcagccctgctcaagtttctgtgtatctctcttatcatttgccacccccctctattctgaggtccttcccctgcctggggtgcagtggctgggctgaaccctaggaagagtttttccagatgtcatctaccttcttcatgggataagtgaggagggggaaggaaagcaggtattcccagtggcaggcaatgccttggctctgcgttttcctctctcctgcagaggtgctgatggttggaaaagcttcccagcggcctgcaaggcctgcacgtaggcagtctccagtgctcattagaacagcctcactcagttcatctcattcgatccctaaaactgtgggatggaaggaggacaaagaaaactgagtcctcttgtctccattcttggtccactccattccatcctcaacactatcctcatagtgatttaaaaaaaaattccaaaggacaactctagacccgttgtgccctgcttattagcattccctccaagctcccagctgcttagagcaaggctcaaaaaattttctgcaaagggccatatggtaaatattgtagacgtaatagtccaagagacaaagttgaggctactaggtaggtgcagcacttatataacaagagagaagacaaatttccacaaatttcttctgatgaaattcaagatacaataataagcacattttttggggcaatatagttctatatagttctactaacaagaaaaatagattcattttggggggaggataacctttcacttacttgaagttcaaagttagtgttccctatcatcaaatgggttgcaaatgatcatgtgtaaaaaacgtttaacttgagggccacacaaaagcaggtggagggctgcatttggcctgtgggccatagtttgggacccttgcttaaaggatcaggtctcagccccttcacctggcaaacctggtcttaggcatttgccctgcacctctcccaccagcaaccctacagccagccagctccaactgctttttgttccttagatgtactttgctgtcttgcctctgagcgtccttcttccaacccaccagcctgggaattcctgtttctcttagcctatactgtttttttttcagggctacttatctggacactttccctaaatctcttcactcccgtagatcccagtatggacctgccgcatggaactgagcacttgggaggttaccgtctgtaactccctcattggtctgggacatttttaagggaaggggctacttcattcctgttgtattcattgcacatgtgccaaaaacagggagggatgctggcaaccctgtcccaggtcttctgactataggatagtgtttcctgtgccacctccaccccaggccacccagttaccttggaagcaccatgtttttatagcttaccactctcctggccttggctgactgagccaggggtgggccctggattcaagccaggcccgtcagtctttccctgaggtctttgaggtctttcaagctgagaaaagaaaaggcacagggacagaaagtaaaactctggagtgttgccagccttgatcttcaccttgagggaagacattgccatgagagatgaggaagatgtgcagagaggagcaaggagaagtcctggacagagagcgccctcctggcatgagagtctagctgaggctcagctgcatcctgccggcgaatcactggctgttggcccttatttggaaaccacaagacaatagatgcccctttatacctgagctagtttcaactgtattctgtcagtgacaacccaaagactcctactgtcccaatcttggcattctccccactgtgccattcgcttccaaacattttttaagctcagggaccccttgttcaaaaacaagtcttggaattccacgatgtgaaatagatggccctgtagtatacactgtgcgatgccgaccacctggccaacatggcgaaaccatctctactaaaaatacaaaatatctccactccaacaactctgagccacgagatcaaggccaagacacgtctctctcagcctcagtttccctctttataaaatacagagtacaggtacccaagtgatatagtttgtatatttgtccccaccccaatctcatgttgaattataatccccaatattggaggtggggcctggtgggaggtgactggatcctacaggtggggatttctcatgaatgtttaagcactatcctcttagtgctgtcctcacgatagtgagtgagttctcatgagatctggctgtttaaaagtatgtggcacttccccattctctcttgctcctgctttccccatgcgacgtgccttctcccactttgccttctgccgtaagtaaaagctccctgaggccttcccagaagctgagcagataccagcatcatgcttgcacagcctgcagaatcgtaatccaattaaacctcttttctttataaattactccatctcaagtatttctttttctttttttctttttcttttgagatggagtctttcttgctctgtgccccaggctggagtgcagtggcatgatctcggctcactgcaacctctgcctcccgagttcaagcgactctcctgcctcagcctccccacatagctgagattacaggtatgcgccagcagctaatttttgtatttttagtagagacggggtttcgccatgttggccaggctggtctctaactcctgacctcaggtgatctgcccagctcagcctccaaagtgctgggattacaggcatgaaccaccacgcctggcctcaggtatttctttatagcaatgcaagaatggcctaatacaccacctcttagggttactgtaggggttaaatgagttaatatacacgaatcacttaacatggtgccaccggtgtaacaaccactcaaaaagcactggatcttttttttacagggtctcactttgtcactcagggtggagtgcagtggcatgatctcagctctctacaacctctgcctcctaggttcaagcgatcctcccacctcagcctcctgagtagctgggattacaggcgtgtgccaccatgcccagctaattatttgtatttttagtagagacagggtttcgctgtgttggccaagctggtctcgaactcctggtctcaagtggtctgccttccttggcctcccaaagttctaggattacaggcatgagccaccgtgcctggccagcactggctcttactatatggaggtgacacatgggcaaacgcagggaacctgccaccctcagcttccgtctcacctctccctcactaaaatgtctttggcatatgggtaatgtttaaattattaaaaatgattgatttaatatatttcttcctggctagactgggaactcacaaagacaaggttcatatttgtcttggtcacagttttcccccaggtctggctagcacatgactggcctattgaaggtgccaagtaactatttactacctaactgatagcagatacgtgtcatctcattaacaaagaggtgtcacacgtgttaccaaatctactgtcttttgcagcagaatcagaaaaatcataagagaaaaatactcgatttataggatagcccctcagaactagttaattcttttggtttgattaattatgttacttacttagggtttcccaggttttccccattttgaaactaattaatgtaatgaaaacatatgatgtaacttatgagatacatttagaacaataagagaaaatttcatattcataaacagattaataaaatgaaaacaaatgaattaaattcccaactcataaacacagaaaaaaatttcaacagagcaaaacaaaataaggtacaaggacagaaataataaagataaaatcagaaattaaggaagtagagaataggatttatgggattaaagtcctggctctttgaaaaaattaacacaatagacaaactaagtcaaggaaaaagagagaaaacccaaatataaaactaagaaattataatgggaagataactgttaaaaagtagaaagatttaaaattcacgagaccacttttcaaatctccatgcaaataaatctgaaaatataagtgaaatggataattatctagaaaaatacggtttgccaaaatgaccccattagggacagaaagcttcaacagatcactttttgtaaaagaaatagagaaaattgtcaaggaatttccctacaaaagaagcagcaggtctaaaggatgtcacagaagacataaacctccaaagaatgcggagtttcaatgctgcataaattctttcagtgcatgaaagataaggtgaacttccaaattatttttataagcaaatataacattgatccttaaacaaataatacatacaaatattggcacaaaaatcctaaaataaatgttagcatacagaatcaacatctgctatggtttgaatgtgcctcccaaaaagcatgtgttggaaacttaatccaaaatgcaacaccgttgagagatgcagcctaatgagagtggattaggccatgaggactctgccctcatgcatagattaatgctgttatcttgggagtggtttggttatgaaaggctgagtttggcctccttttctctctctcatttccttttgctttctgccaagggatgatgcagcaggaaggcccctgccaaatgccagtccctggatcttggacttcccaggctccagaattaaaataaataaatttattttctttataaattacctaatctccggtagtgtgaaataagtttatttattgtgatttatttaaatgatctaagaagaaccatctgataatctccactgatgctgaaaaagcctttggtaaaattccacatttagttctaattaaaaaagcactcacggtaatagaaattgatggatactttcttaacatgataaaatatataaaccttagttctaaaaccagcatctattaaataaagaatcactagaggcatttacactaagatcaggaacatggcaaggatgcccattatctccactactgtttattattatattggaggtataagtcaatgcagttagacaaaagaaataaattggaggcataagaactggaaagcataaagtaaaactaagtgtatttgcagataatgtaatagaatacccccaaaacctgggagactcaatgattgaattaactcaagcaatgaaagaattaagcaattagcaggatataaaatttacacagagaaaccaactgggttcatatattaaaaaaatcaaaagatataacagtagataaatctccatttataatagtaataacgaagatcaaatggttagaattaaacttaataagaaatatacaaaacctatatgaagaacgcttttggatgtgcctgaaagatacaaaagtaggaatgaagaaatggaaagatatcccttgttcttggatagaaaaactcaatatcacaaagttgtcaattctcacaagatttatttataaataatgcaataaaaatactagtaagctctttatggagttagacaaattgatacaaaaattcatgtagaaaaataaacacggaagaatagctagaacacctgatattctagtaaaagaaaagccataaggggtgtctactcctatcacatattaaatcattctataaaatctctgtaattaaaactgaaatattga

SEQ ID NO: 5688 - DNA, 407658 bp, Homo sapiens
  ADAMTS17 gene - 98331993 - 98699650 of chr15; NCBI Entrez Gene ID: 170691; Build 35; sequence includes 20,000 bases upstream of initiation codon and 20,000 bases downstream of termination codon of the gene
aataatttcagaaggaatagtaccagctcctctttgtacctctggtagaattcagctgtaaatccatctggtcctgggccctttttggttggtagactattaactactgcctctatttcagaatttattattggtctattcagggattcgacttcttgcttatttagacttgggagggtgtatgtgtccaggagtttatccatttctcttagattttctagtttatttgcatacaggtgttttcagtattctctgatggtagtttgtatttctgtgggatcagtataccacattttctttaaacactcattgattaatgggcatttgggctggttccatgtttgtttgtttgtttgtttgtttttgaggtggagtcttgctctgttgcccaggctggagtgcagtggcatgatcttagctcactgcaagctccacctccgaggttcacaccattctccttcctcagcctccccggtagctgggactacaggcacctgccaccacacttggctaatttttttttctattttttagtagaaatggggtttcaccatgttagccaggatggtctcgatctcctgaccttgtgatctgcccgccttggcctcccaaagtgctgggaggttccatgtttttgcaattgcaaattgttctgctataaacatgcgtatgcaagtatctttttagcataatgacttcttttcctctgggtagatacccaggagtgggattgctggatcaaattatagatctccttttagttctttaaggaatctccacactgattttcacagtggctatcctagtttacattcccaccaacagtgtaaaagtgtttcctttttaccacatccatgccatctattattttttgattttttgactatggccattcttgcaggagcaaggtggtatcacattttggttttgatttgcatttccctgatatttagtgatgttgagcatttttccatatgcttgttggccatttgtatatcttcttttgagaattggtctatcgtgtccttagcccactttttgacgggattgttttattcttgctgagttgttggagttctttgtagattctagatattagtcctttgtcagatgtataggttctgaagattttctcccactgtgtgggttgtctgttaagtctgctgattatttcttttgctgtgcagaagctttttaatttaattaagtcccatatatttgtctttgtttttgttgcatttgcttttgggttcttgggcatgtagtatttgcctaagataatgtctagaagcgtttttccagtgttatcttctagatttttatgttttctggtcttaatttaagcctttgatccatcttgagttgatttttattattaggtgagagacgaggatccagtttcattcttctacatgtggctagccaattctcccagcaccatttgttgaatagggtgtcctttccccattttatgtttttgtttgctttgccaaagatcagttgactgtaagtatttggctttatttttgggtcctctatgctgttccataggtctgtgtgcctagttttataccagtatcatgttgttttggtgactatggccttatagtttgaagtcaggtaatgtgatgcctccacatttgcttagtcttgcttgggctatgcaggctcttttttggttccatatgaattttaggattgtttttctagttctatgaagaatgatcgtggtattttgatgggaattgcattgaatttgtagattgcttttggcagtatggccattttcacaatattgattctacctatccatgagcatgggatgtgtttccatgtttatgtcatctatgatttctttcagcagtgttttgtagttttccttgtagaggtctttcacatacttggttaggtatattcctaagtattttattttattttttgcagctattgtaaagggggttgagttcttgatttgattctcagcttggtcgctgtttgtgtatagcagagctactgatttgtgtacattaatttgtatcctgaaactttgctgaatgcatttaccagttctacgagtttcttggatgagtctttagggttttctatatatatgatcatatcatcagcaaagagtgagagtttggcatcctctttaccaatttggatgcactcgatttctttctcttatctgattgctctggctaggacttccagtactctattgaatagaagtgatgaaaatgggtatccctgttttgttcttgttctcagggggaatgctttcaacttttccccactcagtataatgttggctgtgtgtttgtcatagatggcttttattaccttaaggtgtgtcccttctatgccaattttgctgagagttttaaccataaagagatgctggatcttgtaaaatgctttttctgcatctattgagatgatcatttgatttttgtttttaattctgtttatgtggtgtatcacacttattgacctgcagatgttaagccacccttgcatctctggtgtgaaacccacttgatcatggtggattatctttttgatatgctgttgtatttggttagctagtattttattgaggatttttgcatctgtgttcatcagggatgttggtatatagttttctttttttgttatgtccttctctggttttgatattagggttataatggtatcatagaatgatttagtgaggattctctctctctctctctgtctctctctgtctctctctcccctgtggaatagtgtcaacaggattggcatcagttcttctttgaatgtctgatagaattcagctgtgaatctgtctggtcctggacttttttgttgttggcatttttttattactatttcaatctcgctgcttgttattggtctgttcagggtttctatatcttcctggtttaatctaggagggttgtatatttccaggaatttatccatgtcctctgggttttttagtttatgtgtgtgggcattcatagtagccttgagtaatcttttgtatttctgtagtatcagtagtaatatttaacattttgtttctaattaagcttatttggatcttctctcttcttttcttggttaatctcactactggtctatcaattttatttatctttttgaagaaccggctttttgtttcaattatcttttgtatttttttggttttaatttcatttagttctgctctgattgtcattatttcttttcttctgctgggtttggttttggatcgttcttgtttctccagttccatgaggtgtgaccatagattgtctatttgtgctctttcagacttttttatataagcatttaatgttgtgaactttcttcttagcactgcttttgctgtatcccagaaattttgataggttgtgcaactattatcattcagttcaaaaaatttttaaatttccatcttgatttcattgttgacccaacaatcattcaggagcaggttatttaatttccatgtatttgcctggttttgatggttccttttggagctgatttctaattttattccactgtggtgtgagagagtacttgttataatttcaattttcttaaatttactgagacttattttgtggcctatcatatggtctatcttggagaatgttccatgtgctgataatagaatgtatattctgcagttgttgggtagaatgttctgtaaatatctgttaagtccatttgttgtagggtatagtttaagtccattgttctttgttgactttctgtcttgatgacctgtctagtgctgtcagtggagtactgaaatctcccactattattgtgttgctctctatctcatttcttaggtctagtagtaattgctttataaatttgggagctccaatattaggtgcatatatatttaggattgttatatttttctgttggactagtcctgttatcattacataatgtctctctttgtctttttttttaaagtttttcctttttttattgttatactttaagttctggggtacatgtgcacaacgtgcaggtttgttacataggtatacatgtgccatgttggtttgttgcacccatcaactcgtcatttacattaggtatttctcctaatgctattcctcccccagccctccacccactgacaggccctggtgtgtgatgttcccctccctgtgtctatgtgttctcattgttcagctcccacttatgggtgagaacatgcggtgtttggtttcctcttcttgtgttactttgctgagaatgacggtttccagtttcatccatgtccctgcaaacaacatgaactcatccttttttaaaatggctgcatagtatcccatggtgcatgtgtgccacattttctttatccagtctatcattgatgggcatttgggttggttccaagacttaactgcttttgctttaaagtttgttttgtctgatataagaatagctacttctgctcacttttggtgtcctttgcatggactatctttttccacccttttaccttaagtttatgtgagtccttatgtgttaggtgagtctcctgaggatagcagaaacttggttggtgaattcttatccattctgccattctgtatattttaagtggagcatttaagccatttacattcaacattagttttgagatgtgacacactattctattcattgtgctacttattgcctgaataccttgttttttttttttcattgtgttattgtttgataggtcttgtgagacatatgctttaaggagggtctattttggtgtattttgaggatttgtttcaagatttagagctccttttagcagttcttgaagtgctggcttggtagtggtgagttctctcagcatttgtttgtctggaaaatactgcatctttctttcatttatgaagcttagtttcactggatacaaaattcttgattgataattgttttgtttaaggaggctaaaaataggacaccaatcccttctcacttgtagggtttctgctgagaagtttgctgttactctgttttcctttatagttacctgatactttcgcctcacagctcttaagatttgttccttcatcttgactttagataaccggatgcatatgtgcctaggcgatgatctttttgcgatgaatttcccagatgttctttgagcttcttgattttgaatgtctagatctttagcaaggccagggaagttttcctcaagtattccctcaaatatgttttccaaacttttagatttctcttcttcctggggaacaccaattattctcaggtttggatgtttaacatagtcctaaactttgtggaggctttgttcattttttttttttttcgagatggagtcttgatctttagtccaggttggagtgcaatggcacgatctcggctcactgcagcctctgcctcctgggttcaagtggttcttctgtctcagcctcccgagtagctgggatacaggcacgcgccacctcgcccagcaaatttttgtatttttagtagagatggagtttcaccatgttggccaggctggtctcgaactcctgacctcaggtgatctgcccacctccgcctcccaaagtgttaggattacaggcatgagccaccatgcccggctggctttgttcatttgttaaaattcttttatctttgtctttgatggattgggttaattagaaagtcttgtcttcaagctctgaagttctttcttctgcttgttcggttctattgctgagactttccagtgcattttgcatttctctaagtgtgtccttgatttccagaagttgtgattgttttttgtttatgctatttctttcactgaagatttttcctttcatatccagtatcatgttttggtttctttacattggactttacctttctctggtgcgtccttgattagcttaataattcttctgaattctttttctgggaatttagaagtttcatcttggtgtggatccattgctggtgagctagtgtgatctttggggctgcgaaagaaccttgttttgtcatattaccagaattgtttttctggtttcttctcatttgggtagactatgtcagagggaagatctgggactccagggctgctgttcagattcttttgtcccactaggtgctccctttatgtggttttctccctcttcccctaggaatagggcttcctgagagctgaactgcagtgattgcttttgcccttctgagtctagccactcagtggagctaccagtctctgggctggtactagggagtgtctgcaaagagtcctatgatgtgatctgtcttcaggtctttcagctgtggataccagcacctgctccggtggagggagcaggggagtgcagtggactctgaagatccttggttgtgtttttgtttaatgcgctggttttgtgtggttggcctccagccaggaggtggtgttttcaggagtgcatcagctacaggttgaatagggaggaggaaaacttgccccagggttacatggttaagtattcctaattttctttctttctttaatgtttctctgcaatattttatagttttcaatatacaggtctttcacatcctttgtcagacttatccctaagtattttatgctactgtttttatgctattttatgtcattgttaataatattgtttttaaattctaatgtttattcattgctagtatatagaaatacaattgaaatttgtatattgatcttatatcctacagtcttgctgaacttactattagtcttagtaaatttttgtgtggattttctgtgaagatgatcccgatgtctgtgaataaaggcaattttacttcttcctttccaatctggattcctttcacttatttttcttgcctgactacatcagctagaatttcctgtacagcgttgaaaagagatggtgagagccaacacccttgtcttgttcctgactttaggggaaaagcgtttcagtctttcaccattaagtatgatgttatctgtaggttttttcatagatgtcctttatcaggttgaggaaggtctcttctgctgttagttggctgagagctttttttttttttaatcaggaacggatgttggatgttatcaaaggctttttcatgtcttctgacatgaccatatgatttttcctttatagtctgttaatattgagaattccaatgattgattttagaatatcagacaaacactttctttgtgatcactcgagctctgtgtatttccgatactagcaaccaaggattttggacaaatacaatctagttattgagatctgatcatagtttctctgcccagctttatatttcaaagcttaattgattttggaagaaagttctaggcgacatatgtaagaaaggggagaaacccataaactgctggtgatgtggaaagtatttcttaccaagtacttgctatgtgtcaagtggcttaggggttgggtgcgaaaatacacactcctgagatgtggtgcccagacaggggctgttgcaaagagaccccaggaccccagggttatttaaagaacagagccttccacaccccttccctctctcgatagcagggcacacctttacatctggacttctgttgctgttattattgtttttaatcaaacctgcataaacctggtgaatcgaagttacttcagagaagaatgacagtcagtgaatccagagagagatgggtttgatgctttcttttctctggccacgtgacagttcatggagtcttcagaaatttctaatcttatcaaattgttttctttacttagtcatttattcagtaaacataaccaagtgtgtataatgtgccagcactctcctaggcccttgtctctgtttccaagaattgtttgaattgctgcattacaagttcaagcataactgggaggtaatctagcacaactcctcatttcacagatgagaaaactgagaatctgagaagagaaaaacattgccctagactctgcagtcagagaatcactacaaccaccacgtgatccattcacaggtgagttggatttccctttttcttcccatgtccccccttaatgatagagggcatggctctggtgtcccagggtttgagtcaaattcctcttccacaaatgaccatctgtgcaaccttgatgaacacagtgcttacttctggcgctattgccctgagtatagaatgtggttaataataacgcctatgtcaaagggttgtggtgaggccactggttcttgcctacttcctcctgcttctagctttctgatgcatacataggtggtcaccatgtcccacagagaaagaaacaggaaccatgctcacgcattaaatccttgtgacccagtgggaaattttgtatctttgttgacattacatttttatctataaagtgagattcttcatgagacatctgtgagacatagtcaatattttaagattttataactctcaaagatataacttattgagtcatcttgggcaagtcattagcatttctcagctcacttttcccacttattagtgaaggataataattttttcctggcagaattattttaagaattaaatacttacttgtgtatgttatgttatacaaatgccatcctagttgtaaaaacaaagataatacgtatattaaaggaagaaccattctggaatctggaatttaaaaaatatttattaattttttaaagtaatacattcaatagttaaagaaaatgatatagaagttcctaaagtgtgaaataatgacaccttgcccaaatctttctaccctagactcactgctgaaagcaatccttttaactatttctggttttaatttttctgatcattttcttcataccattaaaattgttcttaatttttttatatgtcaagactagatatggcaagtgatgtattacaatgatggataaggatttacctcactttttatcacattcccatcccaatatgagacttttatttcttttattaattacctttgtgaattcaaagtatacatgtatatctttacttcttattttatcaactataggcaatatctttctcttcactttggaagatgagggaacttgccccctatacgtttctttgtttctttttaacttccatctcttctcctttgttatctactcttttactttgacattgttatggatgacaacttttacaattgattctgcagccgggatgatatattctgctatttctttttggttgattctaaaagttgaaaatcattgcacagtgtttacattatgattttgatataattattatataagtcttttctgaagttaagcatgtatcatgactatatttccctttgttgtgggatattttggccctttttttctttccttctgtcttttgtgtgtgtgtgtttctgtttagcttctggacactgggacttccatttcctctctgatggtgtcagcaacacaatgcaagcaccacattcattgtttcctagggaagctaaacagttccattcctggacctataccatgggtgggtagagaggctgcacacagggaccaactagccatctggctgctcttgcagatgtacttaccctgctcagcctacaggttgcttttgggtgccctaaattttttatagccacttcttgcacacctccattagatgaatgctttcatataaatctttaacatgccttagaattaattttagtttgtgttatgactctgtagttgttagctattgctgcataacaaattagtccaaaacttagtgactcaaaacactaataataatttattttctcttgtttttttaacggtctggaattcagccagggtggacacagtgggaagggcttgtctctactcatggtgtttggggcagactcaaaggctgggggctgaaatcatcggaaggcctgactgagggtagaggatctgcttccaaaatgactcactcacatgacaaattagttggttctggcaagttggcctcctttccaagaagtgcctctccacacatgtgcttctctgcagggttgcttgagtgtcctcatgacatggctggtggttcccaaaaaagcaagtgatccaagagcaacattcaggaataagttcaatcctttctatgacctagcctcagaactcacaaagcatcactctcaatacgccctattcatcagaagccaggcagtaattccagcacactttctaggcagaggaattaggtacacctgttgaagggaagcaggtcataattagaggatatatttttgaaccaccacagaatctaacttaggttcgtacaaatatataaacagctgtccaataccacatattgaatagtctatcattactatatcagtctgagccatgactatttgcatttactaagaatgtgtgttattaccattgaagaccttccagtgggacaagatgtgaaagcagaagacagtggtattgatgatcctgaccctgtataggcctaggctaatgtgtgtttgtgtcttaatatttgacaaaaagtttaaaatgtaaaaaataaacaacttcaaaagtaggaaaaaagcttatagaataaggatatgaagaatgaaaatatttttgtatagctgtacaatgtgtttgtgtattcaagctgttattaaaagagtcaaaaaatttaaaaattcttaaggtagaaaagttacagtaagctaaagtgaatatattattgaaggaaagaaaatttttaaaaataaattgagtgtgggcctagtgtacagggttttaaagtctacagtagtgtacagtaatgtcctaggccttcgtatttactcaccactcacttactgactcacccagagcaactttcagtcccgtaagctccaagcttacggtaggtgccctaggcaggtgcaccagtttcaatctttcataccatatttttactgtatcttttctatgtttagatacacaaatacttaccattgtgttacagttgcctacagtgttcagtaccacactgtacaggtttgtagtctagaagcacagcctacagcctgggtgtgtagtaggctgtgctgtttaggtttgggtaagtacactctatattgtttgcacaatgatgcaattgcctgacgatgcatttctcagaacgtctgctcactgttacgcaacggaggactgtgaattgggagtttattttgtttttcagtctgtactggcagcgaatcatacatagcttagtttatcagacaagctgcttttcttgagcaaagaaagaactaggagagaaacggggctttggaaccctgatgcggcaatgctgaaagaggagaaatatcccaaggaagggaaaggtgtgttgcagaacgatgaaaaataggcggcttctcacagctgttctcaggggacgagacggggtgggatgcagctccgccggtgcctaacactaagggccctcatcctgccgattcagttgtgtcgggaccgccagtgctgtctcctcgtcagatgctgcttctggtctccccgcagaagatgccactggagttgccttttcaaggatggggacatttgaaggccctggacgctcagctctgaggctggctgggatctcactagcaccccctggtggaggccggagccaggctgacgcgggaaagtggggcacggaagcgctgcggattggaccggcggcagctaggccgaaacgcctgtatttaaagggatagtaactcggactcgttctgcaatatccccacaagggcctgactgagcgagcgagcatggacggccgcggggctttctggacagtggccattcccagagccaggcaggaaggcctcgggaggctggggctcccgttcccggtgaagcggacgccgccagcgccccagaacccaggaggaagcacacaggccccacagagagtggttggcaagagtcactcggggattaggatgccggccaaatcgcggaatttgaggctggaatccaagctcaacaggaaagtagtgaaatacaaatggggaaaacagggctctggagcggggagggagctggtgccggcatttcccaccaacgccggtttaggaagacgggaccgatgccggccgccccctgctggaggggatgtggcatctcacgggctgccagggagcggggttggctactcctgcaaccagcgtgaagagggtctcaggggaggctgtggtgggatcccccacgtgcccttgttcctctcaccgttacctctggatgcctcggggcaaaggccttcttccacctatagacagagtctacgcaggggtcttggaacccgggcacaccagtccccagctaacgaaatccccgagttgggggatttgagagggtcacgtttggcccaagaacccgcagtcctctttggtcttcggccctctatttctaagcgtgggcttctggcacggcggctctgggcacagcccatgctgctttcgggctgggtggtttcaacgacgacaacaattatcacagtgacggtgaccttcaccccaacaggactgctgtgtgtgaagcactcaagagggcccctacaaccaacctgccaggagtcggctcctgaaaacagggtcggaaaaggtcagtgcccatcagaatcgagctgtcggcaaaaagctggagaggttaggagctttgtctatctcaagggtaacaaactgctttgaccctgagggctctgaagacgactttccctcaccgcagctctcaagacaacagggatcagactcagaaagacactgcctgtataaggctcttgtttgtcttgtttttaattcctgccctctgcctccagatctcagtcctctatctgtgaaacggaattcggccttgcctgtccacgaaatgaagacaaggcatctcgtgtgtgttaagatgaaacaagatcttagcaagagagtaatgatttcttttttaaaacattttttactgtagtaaaatgtactataacgtaaaattaccatttcaatcatttgtaagttcagtggcattaagtacattcacattgtcgggcagctgtcagaggtgttcgaaccagagcgactccatcttgaacaggtgctgcgcaaaatgaggctgagacctgctgggctgcattcccaggaggttaggcattcttcgtcacaggatgagtcagtggctgccagggaggcaggttggttaccccaggaaccaatgaattgcatctcaggggaggttttgccagatacaggtcacaaagaccctgctgataaaacaagatgcggtaaagaagctggccaaaacctaccaaaaccagatggtgacaaaagcaacctctgctcgtcctcactgctcattatacactaattataatgtattagcatggcaaaagacactcccgctagtgccatggcagcttacaaatgccatgacaacatctacttagttaaatttgcatactatgaatatgagtatgcaaatacctgttggagtccccgctttcaaagctttggggtacacatccagaaacggaattgctggatcatagggtaaatctattttggaggaatagtcgtactgttttccacagtgactgtaccattttacattcccacaaaattatttctttctatctgccttcccccactagatagaacacagggaagttactttttcgtttctaaatccccagcaccaggaacagtgtctagttcataacagagctctatagagaactgtggggaaagaagtgcaatttatatgctgctgcctcttcatttggcatctcagtacgtggcacacagaaagtaggcactgaagaagggttgaaggacctaatgagtacataaatgaatgcagttaccattgctttttccttggtctagactgaggacagacatttttgtaaattaagctacttagttaaatgtagacctctggccagttttgctcatccagaagtttcactttaatgccacttcaaagatactgttttctgtaaatcagatcataattgtgatgagaatgatgtggggatgtgtcctggactctccccatcccccacctcacagcctaatgtataacgcacattttattcaggaccattttggatgtgtaggatctgctccagaacacaggataatgggcctcttttctggggatggtgtggttccatcattagatagcaggtgtgtcatctgcaggtactggtctcactattcaaccactggttgaaagattggttcaagatcaactctttgaaaaatcaaagtattacttttacaaatgcttttttgatatttctcaaccaattaaccttgaaaagttcaccatgaagttgaattgcctaaacttatacattgtatgggcactgagatgcaatttttagggctgtgtgggcatcagcgatgcctgttttcaatacattgtagctatgctcagtgtcatgggccttgtagggctgacctctttttgtccaagcattgaagccaatctaaaactcttttccaaaaagaaaatgttttctttgctaataagtcaccatcaactgcagcagaggcagctgtttgggcttcacaatttgcggaagcacatgccagcctggctctgttttgtgcttgttcacagtatatggctttggccttgttcagcatcagggagtagctgttccttgggtcatgcatggagttggatttaaccctggctttcagctggccagtcctcatcaggagcttgggcaggagaaatagtactctggtgaatggtctgaagacattagatcatagatgaccttggctgcaagcaactaaatccagaccacaacagtttatccaaatagggttaaccaaacaagtacaatgtgtacccaaatgatatcagtgtcccatgatccttccatcatccactggatgatttcttaattcaaagtcaaacaaaaacaaaagcagatttgaaacattctcatccatccttgaaactggatcacatgccatggtctcgctctttgaagtggtcaactgaacagctggatacatggtctggagctgggaggaggagtgccttagtccattcctgctgctatgacaaaatagcttagacttggtaatttataaataatagacatttatttctcattgttctggtggctgggaagtccaaggtcaaggtgccggcagattcagtgtctggtaagctctctgtgtccaggatgacaccttgttgctgcatcttctgaagaggacaaatgctgtgtcctcatatggcagaagagatgcagggcaaaagggccaagaagccctcttgagcctctttaatgagggcattaattccattcatgagggcagagccctcatgactttgggccttaacccaaaaggctccacctcttaataccagcacaatgaggtaagtttcaccatgaattttggagggacataaacattcaaaccgcggcaaagagtctggaccaggggatgactctgtgaagtgcgtgcttgtccactgccaaaagaaagggataagatgaggaatgcgaagctgagaaggggagggttcgagatcagcactgcattgagagaaaggggagttgggcagaggagtgtagtagcaatggtgggcatggcgatggctcaaatgaagaaggtgattgcagatttccctgttgcatgcttggctccagtggtgttcagagctcaaccacatgctcagtgagagtagagagttgagtttacccaggcctgtagttctgcatgacaactgcagtgaaaagggataggggagggtgctgagcatattggcaagagtgttttcagagtcatggggcctggaatgcaagctggatatggaggcaagtgaagagaggctggtgggttgggagatgcagactgagagaccttctgaggtaggagcatttggacgagcatgctgggaggacaagaagctgtggtcagaggtggatgttcaagttttggaaggtggaacagctaggggtgatgacaaggtgtagggtgtgaatttgagagtggacagttggggcagcatagcacagaaggtcactgaaggaggaaattgaggagcccagagcccagggtgggggatgggagttgtctatatgtgtgtctgttaggggtcgagtttggctgcatataacagacaacccaaatagcaacagcttaaaagagacaagagtatattttttttctgatatagcaaaaagtgcagaagtagacagctcaggtctggcatggtgactccaagatgtcatcagcaacccagagttcattgatctttttgcttcccaggggtctggcactcttcctcatgcttacgagatggctgctggaattccaggaatcacatgcaaattctagtcaggagcaaagaggaagagacacagtgaaaaggggtatacagcggcagaaggaagctcctcaaatgaactctgctagaactctagccagtagcttctccttctatcacagtggccagaactgtgacaagtgaccatccttaggggaaaaaagatgctgagaaatgtgaattttgttgccaccttacattttcaaaggagttccattcgtaagtacagaacgctcagagaagaggcagcagatctaggatatggagcagcagctcttaagggcacagtgggaaggtttcaagactgaggaggatcttggatttgggtaggggaaggcagttcacagtattgtggaggaaatgctgtgaaagagaaagtggaaggcatggaagcttaaacttttaatatgactggtgaatacaaggatgaagggcaaagggaattcagactcatggtggtcagattaagaccttcagcggctctgtctcccagccccacatacccacttccatgttctgctctttactgaagctgaaagtctgcaaccttcattctctgactcccttacattttcttaggcttcttgctagcttctgccaaaaagaggccctggcaggagattagatggcaggaggcagaggtaaggattccatgttaacaggtgctggaagttgctggtgtggcaatgagaactgggccccggtcaaggcagcactactttggtagatccagaatcaaccatgataaccgtgacagtgtcttcaacagtgcagcagtagacacaggcccctggtgctggaatccaatacagggacaggagcagcacggagtcacggaacaccgtcttgccttcatgtcactttaccatttcttctttctccctcttactctaccagctacctgtggagatgttgaaccttttatctgtcgctgtctgcttaggaacagaagaaaaggcagctgattgcttgactcagctttcagcttgatttttttcctttggcagagtgaattggggtcccaggtgttcattttccttttgtagtacctttcctcagcatgcaattaatacaaaaagaacaataaaccttaacaaagtttggcttgtattattccagactttcctcttggattttatgtacacttatctgaatccatgcagatcatgtcatgtgtgtctgtgtgtttatacacatttttttttcggtgtgcctcattctgcaacttgattttttaaaaaattcgataactgatcttggagatctgtccatgttgttacatatatgagatttttgtatttcctttaattaatggtgttcaagtagccgtttatgtaacgatgaacattcaggtttttgcaattttttgctcttaataaggtgccctggtgaacaaacattcttgtacatgtgccagagtttctctggagtaattaaccagcgtggaattacagagttgtagaatgtgtgcatttttagttttattaaaactaaaaagtaaaactttaattttacagtttgcccaattgttcctcagagtggctgtgccaatttatactctccacccctaggtaggagagtgtcctctctaattcttgatttttctaagctctttaattttggttagttgggagataaaatagtatctttctgttttagttttcatgtccctatggactaattttagcatttgagcatcttggataggttcttgataggttggtgatggctacttcaggctgacttgcgcttgtgaggtggtgtggcccatactccatggttttcagtggcaggccttagaaatggctctttttgacaaaaagattcactaagaaacttactgtgatatctttaaaaaaattaatattttgtgagtacgtagtaggtgtatatgtttacaaaatgtatatacatgaaattttttgatatggccatacaatgagtaataatcccatcagggtaaatgaggtgtccatcacctcaatcaccaaggtttcttgtgctgccagaaaatgctactgagctgtcagtcatctgaggttgttgacctggacagaggcaagggggagaaacacagccccaggcctggccaagagcaggacctgtgcagatgcccccagaactgtaggtgccaagcagtgagggcagccccttttgtggcaagcctctgtggagggtcactgttcagccttggggttcattatatttcggggaaggtggccagtgttatagattccttcagatgatatgtaatcctgtgatgaatttagattccgaggcttcaagcagcatccagcggggaactataacctttctgctatgataaaatggaaaagagcaggacagggaagggacgggaaacctgagattggttatggttacacttaattgttttttttgttttgtttggttttgttttgtttttttgagatggagtcttgctctgttgcccaggctggagtgcagtggcacaatctcggctcactgcaacctccaccccccgggttcaagcgattcttctgccttagcctcccgagtagctgggactacaggtgtgcgccatcacgcctggctaatttttgtatttttagtagagacagggtttcaccatattggccaggctagtctggaacccctgacttcgtgacccgcccgccttggcctcccaaagtgctgggattacaggcatgagcctctacaagatgctattcagcaagctaatggagtcaccttccctgcagacctcagttatattgtggcaggaaaggatcaactcattctgtttctgggagactcacgttcaaggctaggctttgggactttgtgcctccgtttcctaacctgtaacactgagtcctgcttccctcggggcggggggatcctgctgttaataagaagcaccaagccagaaatcaggatcacaaattctagcctctgctccaacaggaactctctgggtaacttcagcgtttttccttaagctctctctcttcctcagtttttcagtctgtaagagggtgtgagcatgcgtgttgcactggctcctgtgggattaaagaagacaggaggtgtgaagagtttggataaacgccgcggatatagccttcaggtgctaactcaggtgtgcgggaaagtggactgggagtctttgcggccacaaacaactaaaacctaacttcagatgtaaagattatatgcagttttggatgaaaccgcttggccggggcgatttccgccctaccttcccgggaaactgggcagcaggctgagagagttccaaaatgaggacaagctctgaagaccagccccgcatcctccagctcttccagggtcccacggctccggtcggctcccgcgcgccacctggtgccgtgtccccgccactgcccagaaaccacgtgtaagaaagcgctgacaacctaactacgcactgtggtttcgacccatcccaaccagtagggaaggaggaggcggggcggaggaaagcgagggcccaatcccctcccgccttccgaggggaaggcggggcttggggtttaccacgttgggtttgtccgcagcgctaattactttttccaaaggctggagggcttcactccggctggcgccgccgcctagcgcgctcctgcttcgccgccacggtccgggggggctgccggtcccgggtaccatgtgtgacggcgccctgctgcctccgctcgtcctgcccgtgctgctgctgctggtttggggactggacccgggcacaggtagcgccccctcccacagccctcttcaccccgcgtcctgcggctaccttccctctgcgttctcgcggcgtcctggcggcccgggggcggcggcgggaccgctgacggcgcccgagcggaggaggcgcgggccgcggccggagtacgggaatcgggtggctccgtggcaggcgcgccgccgccgggtctccgctcgccgatgcgcggcgccgttccgggaggtgctcgcgcggctgcgccggagaccctccccgggtggcgcgggccagcgtggaggtgccgggcgagggaagggaaggcagcgccggctccgggtcgcgctgtccccgcgctggcgcggctggcggccagcgggagggcgggcgtccgggcgggccccgccgcgctgacgcgtctcctctctccccgcagctgtcggcgacgcggcggccgacgtggaggtggtgctcccgtggcgggtgcgccccgacgacgtgcacctgccgccgctgcccgcagcccccgggccccgacggcggcgacgcccccgcacgcccccagccgccccgcgcgcccggcccggagagcgcgccctgctgctgcacctgccggccttcgggcgcgacctgtaccttcagctgcgccgcgacctgcgcttcctgtcccgaggcttcgaggtggaggaggcgggcgcggcccggcgccgcggccgccccgccgagctgtgcttctactcgggccgtgtgctcggccaccccggctccctcgtctcgctcagcgcctgcggcgccgccggcggcctggtactgcccgcgccacctccgggtcggcccgtccggtctgttgcgacgcagagtggtcgccgtggagggtgggggtggggcgcctctgctggaagtccagcctccaggggaaccggagggaaccccctgcctttccacctctccccatcccccaccccggccttcggtaccctctataggcaaagggggtgggaggggcagcatcccagtccagcgcctctgcagcccgtggaacccgcgcggagctggggttgcgtggggtatacgccgcccgctctagggagcgcagatctggcagggatgaaactgtcagggccctggacagaggcgccttggccccaatgtagagaacactgcatctgcaccgccgtgtcaaagtgtatgtcacgggagtacctgtgtacgtgtaggtgttatgttcttggacttggaggtgggggagtgggcattcacctcccttccttttgagtcttctctctgtacctggaacaggaagtttggagaggtacccagacaggccacggctcaccccactcttcctagctgaaacgtaagaaacaggagagaaagggtgtttgtctttgcttccttatactattagtaggcatttatctggtgcccacccccaaccaggcctgaggggtgtttacattggtgataaaccctattcctgcccccaggagctcccttgctgtggcagtaacttccctgccccgaagttcctggcctgttgcatttgaggcacccggaacaggtgctcccagggggagggggggttcttgtgtgcacttgccctgcctgcgcgcacacttgatcatgtggctacactggcgcccagacgagcactcagcttctccatcgtgccccgaaagccgcacacatggccggcagatgggctgcccccagcgaagcttggtatggacccagagcatgaaccgcaggggttctctgtcttctgtcatgactggcctctggggaggcagtttctgatattagtttgtgtctgtccttcccaggcacaagaaactgctccccacacctccaccttttcttgtgccaccatctagaattctccagcccttactcacagagtctgtggcgagtcctcgagaatctacgaagctagaaggctgggggtgcaaggtcttatgtgagacctctctttcttcccagtcctgcgggtatctctgtgtgtagtttcctagatcagtctggctctcctttcaggaattttctgagttctgattagggtatgatagacttttgctcagctgggaaaaataggcaactttggtgaaacaaggaaagtgatatagacccttggagggggcctggtaggaaggagctaatgtggacctggggcggggaatgtggacctggggcggggaatgtggacctggggcggggaatgtggacctggggcggggaatgtggacctggggcggggaatgtggacctggggcggggaatgtgggttgtaggcaaggaggcttaagtaggagtgagaaaggctcagatcactgtagggctcgggtcaaggctgtatcatgttctgggagggactggaagggccacatcatttttcctgtttttgccaaagtgtttaaagtctaagtcacatcattgtactgtacatggaaacatctgaatcccatttgctgcggtttagtgagtttctgtagaggtcagagtttatacttcttggtgtaaagtttccagcaaggagctatctgtgaaggcgccgaggtggaaagctggataacattgatttaaaatccttgcagaatgagggctgggccctgtcatagatggcatctcagccagcttctcggcaagactgtccttccctttagcaccatgtgagggtgctgtgctttagataaaggaacctggccaacaggctgagttcagtgtgtgccagtggcggttgtacctctaagacttcagcttttaaattcctgccggagcagacacttctgttgtttagtctgccttgttcatcccgttcgtgtgagctggacattggacacttccccctctgtacgtactgaaggccggagggaagagacagtggggtgacttggaggtggaccctttgtttgcaaggtggtcctgaaagcgtaaagaaaagaaagcaacaggaatttgggctaaccaagtttgcattgcagactagctttgactttggttctcagttcaggtggctgatgatgttgtgttagtccctcttgactgtggtactgtggtagaagctctgtgagtggagatgtggagttgtgtgtgtgtgtatttgctacgacaggctcggctataaggtgtgggaagggaggctataagtagatgatttttggtggccatggaggaggggcatttcgaagtgtccttgtatctaaaaatgagcaagagtcgggcaaacttcttctcttaaggaccagaaaataaatagtttaggctttgggggccacatagcctttgttgcagctgctcaaagctgccctttcagtgtgaaagcagctacagctacggatggcatacgagcgaatggatgtggccacgttcaacaaaacttcgttccggatgttgagtatcatgttaattgctggtaagtcccactgtattgaacatctcctaaagggctcagtagagagtgttgagtgcctgggctgggggcacacacgttctattccatgttgcatggaatctgtgctgtttgtctccagagatgtttgctgtctgtttaaaggagacgaattattagaatagatcattccgtagctgtttaggggccatggagagtaaagcacctgttccatttttgctccttttccttttgacagcagatagaggcatgggcctgccgcattcctttcttggtgtcttatcctgaaaagctgggccagctgcgccttttggatcttcaaaggccatagacttaagtattaattgttttctgtttatgcttcttcattgtatttacatttccaagagtctttagagcatgggttttttggaagtgtttctatgagcatatcatttcaaagcatgaacttcaggtgtctgaggaaggcctttacactcttcgtgaatttatgtaagttcggatcagctgcctctgtgatcaggactggatcgtggaaggccagtggaattggaatcaggctgaacttcataggtagacaggatagcggagagggcacttcaagaacagcatgagcgtcaggctctgaaaagaatctttgcagcttgtctgaagtgagtggctggaggacttgttttaggaagagtgaacgagaggaggggagggctggaggccccctgctgtcgggtttggtctgccaagcagtggccatcctttcttggatgatactcacaaagcttgggaaggccacccactggaatgtgtccaccccttcttggaaaaagctgtggcctgccaggggcacactgtgagatggtgggaccagacagaccaccaaggagctctgggctgcaaaacattaagccataaccgcgttccaggtcaccttgaaggactgtgagaaggtcagggatccacgttccaggccaccttgaaggactgtgagaaggtcggggatcctcctaccatagctcttctgttgccacagccacatgctgtaggactcttatttggaatcactggggtcagtctggtggcccagcccacctcactctgactggtcagcctgactgcagaccacgtgtccatgttggtagcacgtcatttgtggcacatgggacattcatagttccgtacagctattccagtccacttgagaactttagagaatgcatacctctaatttataggggagcaagtgtagtccagataagaatagatgggggcagccaggtgcggtggcttacgcctgtaatcccagcactttggaaggccgaggtgggtggaccagcaggtcaggagctcaagaccagtcttggccaacatggtgaaacctcgtctctactaaagatacaaaaaattagctgggcatggtggtgggcgcctgtaatcccagctactcgggaggctgaggcaggagaatcgcttgaacctgggaggtggagcttgcagtgaggtgagatcccgccaatgcactccagcctgggtgagctcagccagctgatgagtaggcagcttaggttagaagtgttggggaccccacttttaagagggcagcctgcacgtgtacgactcctgtgatgagaaagcaggtttgggatgttactacttctttctttagaaaagagttttcaaaccctttcgattgattgatttacaaaattgcccagctttataatgcagcctactcgatggagaacagctgagtaggagttagtcttgtcaaaaattatatggtgtggagacccattggaagggtctgcattataatacatcattatattgagacaggtctgaggaaggtacgtagtcctaagtgattacttattattgctgaggacttgatcgtgtgcagaataaatatgtttggagaatacaaagcacatatatagaactttgtaaaaagaaacaattgagtggatgttaaggggcactttggcaggaatggaagaagggcaaagacagttttgtggagttgagaggcacggaagtattggagggaagaactcagaaagttctaaggcctctggctgccacctctggaacaacattcctgtggcctcatggtggcttctctttgtccgcctttgtcctctccagccctgcatactcttgttttcctcctgattactcagggcttcatccagctgcagctctccagggctgggctgactcctcttaggctgccaggcactgactgctcctgcaccaggctgcccaccagcatcgtctaggacacacgttagattttcccactttgaacttttgttgacaacatttaaaaacaaacgaaaaagaagtaaaagatgggacgatgaagtgaagcagtcttctttgactgattgcattcttggagcttacttcctgaactctgaaatactgcagctgcctgatcttggatgtgtgtgatggggaagatgttttttgcagccagtacatctgagggaaccatgcagagtggttggttaacttttccctggacccgcttctgtgcacaggtccccagatgcatagtcacattcttgcttcttaggaaatgaaactgtttggccatttggagctgtgatcttgagcgagtcacttaactcctttgaacctttctgcctgcagccatacaggggtaaataacatagccctgcaaggctgttggtagaatggaagaagataaagtctgtgaaatcatttagtgagagcctggcacattaaggcattaaaaacaggccgcttctcctgccctgcaggctgttcccagacttttctagttatacatcagctgatcagtcatcgctgttgcctgaatgagcagatcattatcacgcacctgccacgtgcaggatgctctggtaggcgcccagcaaggctcagagagaaagacaatgcaggccctgtctgggaaggcagtcccagcctcctggaggtaggtgtgctggagcctggaactgggcagggcggggctctggggagggaggagggtagccttcagattccaggagggagaagtgagtgactgaaaagtcaccgaggccccattgtcctgagataagggacccatgagtggatttgtggggtggtggttttacgggagagatgggggtagaggaactgaactggcaggcgtgtggattaaatggggcaggtctctgggtgccaaccgaaggcatttggacttgatcctagagcagtggttctcaaccttgagccggcgttacagtcccctggagggcccgttaaactgactgctgggccccatccaggagtttttgatgtagcaggtctggggtgggcctgagagcttgcatttctcacaagttcccccgggggtgctgatgctgccgtcctgggagggcactctgagggtcactggctgagaggcgatggaggatgggtagttggggaatcctggggctagccgtatggggaggactgaacgaggggagcacttagagcagggaggtgaccaggctcaagcctccgaccatggcaagcctcagaaaggaaggaagaccacacgagagggactctgaagggcaggctggcagtcctttttggctggctggcactgactagtggtctgaaagggctgacactgaagtgagggacccccacattaccaaggagaggcttgctttgggaagaagaccaagcgtctgtgctcaggcatttcacattcgaggaggcggcgggaccgggggaggggccctccaggtggtgcctcagaaggggtgcaggttgggaagccccgcgtggccgtgttgcgtgggggagcctccttccacggaaagaggtgcgtgcccacccgagagtcggggggcaggacgggaggatcgaaagaggtgtgtgcccgccggagagtcagaggcaggacgggaggatctgcagttacagggtggctttttcttcttggaagctggttggtccctacaggaagcaaactcaccaccccgttggccctatcctctcaacccatcttgacctagagaaggagacctgagacccactcatgttaactgaggagctgcagactcctgaagaaagggaattccattgcggtctttgtggaatcgtgtgactttgtcccctcccacagaggcatgctgctttgaagcacacaggacagacgttctctgttatcttaactgcattttctaagctatgccgagaacatgtgctaacgttaggtgataaaaacctctatgtctttcacactttccacactgcagtgagagctcgtcctgcttcaggcacgaggtggtgtggcgtgaacaatgcctgatttacaactctgtcttaatagaacccttcaaagcaagtacccacaacaaagagagttgaaaggtaaccactcacaactgctgaaatatcaagttattgcctgatccattttatttgagccacacttatagtatagcataccaaatcctgcaaaactgaagatttctcttttaagagcaccatttcattgggggctttattatatgccttaaaaccaaggggcttcagggctgccagttctgtctgccataggcatttatttctacaaagtttgtctctttggaggacggttgcaggcctcttgtgtctaaggcacaggctcatagctagtgtttcttcatcgccatcaatgggacagaagaggccttggacaaacatttccctgagtctcccttccccgcatagatggtgacacgggagtcacacagatccaagaagccctgctcagcttttggggccacgcgcagtcgtgggccagaagcaagggcagtgggcagagctccacagaggaagtcccaggttccaaatccaaggacctctccacatggaatcaaggcagtaggtgtccagggtctccagcacccagtgaaaagctaggacggcgcttctcaaccctggctacacattgaattttcctggtcacctttgaaaaaatatcagtgcctgggctccaccccagagattccgattcacttggcctggagtaggggctgaggcatcaggagttttcgaagctccccagatcataacaataggtagccggggatgagaagccctgagccagggggctgcaggcagtctgtgcacgtaactgcattttcagtcgaattttttctttctgagtaactgttatgtggcagacattggcaaaaacaggaggaataattctgatcttgcctcagtggaacaaaccgttaggtcgtgaaaaggtcctataacatggggtagtgggctggaatgtaagagtgcagggggctgcggggaagggggtttatttagggaagagaggtcagggagagagaaggaaggctggtgggtatttggggtgagactgtgtgtaatgcataggtggcacttctcaacaggacgtttgaccactggtggcatgctgacaatggcagtgttaggcttgaaggaacctggggacagtgagacagtgagggaggaggaggcagggcccttcctcacgcaggttcccagggtgagggccctgtacaacccctccttcctggtgctagcctggccacatccctgttcgaggtcggggcccaagagggcaagtggctgccggggcgagtacccactagtccattcatccatctttccccagcattgctgttttcttccttaagtttatagaaaccagcacatgggggccctgagaattgtaaagaaaaaccttccctaaggtgctaagtgatgctttgcatgtgtatatgagtgtgtatgtgtaggatttctcaccaaggtgagatctccctgtctttaaaaatttgtatcagcttagaactaacagctgactgctttttatgccggggtttgtgaatgcaaactctagactgaacgaataataactagctttgaaagtgctagatcctgggggggctttgacccacagccagggtgtttccaaatgagtgcagcccctcattagagtgaagcgtatcctctggggagcaggtggggggtcctcccacgcggggctccatcccaggcactgtgccgtaccctgcccactctttcttgactgcggcagttttcgggtgttctgcaccgaggccgcatcgcgcacagctgtgatggagctctgcagatcccactgtggccaccgtcttccatttcttcagtttccccaaagtttcctagtgaacaaactcaagttttcactttgaaggagagggaggaaagctgtgctctcctgcaggtcatgcagtgccactttgagacagttttatttgggcagtaaaatctttgagtttttcttggcaaaagttctaatgaaatggaaaccttgaaatatgcttagagcggtaagtatggcctcaccctgtatcttggggacgcaagattgtaggcgatcttattagttgatctgatttactttccaggaatcttggtactggtgcatcctttcagaacgtagagctggggtctatctcatttggcttaagtgagttttatacttgagactggagttagctctgcgtgtggtggggagtgctgtttctccaagtgtggtccctgtattacatggaaacttcttagaaatgcacattcttgggctccagcaggacctccaggtgatttgggcacacgctaggctttgagaaccaggggtgtagtgtgtcatggcttttgaaaagtgagggtggaagagggagacaagaaaggatgccatggccccctgagactcatccgccagatctcctgaatctgcgatcaaaggcagttcgggattgttcccaggagaaggggatgttgactgcatcgatcagtgttcaaaccaggtcctcccctggccctgcctgggttcgatttccttgagagatttaccattttgactctgcataagaagggaaactagcagcaggtgcctgctgaaggagggcaaattgttttgatgctgtcaaaacaatactaatgttactcttaatatacccagggataagatacatttttccattagggatacaaatgtcattcccaacaatttcagtgttgcctcccaggtggacttttggggggatgatttttgaagtaacttaaaaaataattttaaaattaaaaatttgataatgaagtagttcatcttctctgaaagccaacatggaaaatggatgctgttgtatctgtctctgtacccctacccccaacgcagctgctctgtggtatgtttgtaagtcacacacaagctcactcttgggctcaggtaaatctgaccaatctgcaaagaaacgagcccagacctggaaaaccaaatcacagcaaggtggtcttgcctgcccctccggggggccatgggcgtgtgtgagtgaggatgaccgacatcgcgtttccttctcctttctggacaggttggcctcattcagcttgggcaggagcaggtgctaatccagcccctcaacaactcccagggcccattcagtggacgagaacatctgatcaggcgcaaatggtccttgacccccagcccttctgctgaggcccagagacctgagcagctctgcaaggttctaacaggtgagtcggggcagcagcatgaccagcttagaacacacgcacagcccacatcctttgtgtgtctccaagtgcactgaagccacatgagtgagaacttaccttcccctatatttcaaaagctgttttattgccctgagaccacttccttttcctttctatgtgtcttagtgtcggcagtcctttgaaaaagtcatcgttttgtttctgcaaggaacctaggatctctttcatgcagtccctcaattttatatatcaagagcaagttgaggtccaaaaaaccttgtagccgagcttggataagaattccctcctcctggtgccctggccaggagctcactcttaataatacagtgctcccgagttctggccgcagtaactaaagccacctggggcgcctctgaagctgtgattcgattctcgattcttacagtgtggcccccgggccagcagcatcagcatcacgtgggaacttgttagacatgcacattttcaggccagagctgtgaatcagaaaccctgggggagggtccagtcatctgtagtttcacgggtcctccaggggatttagatacgtgctaaagtgtgagaaccactgctttaaaacttgccatgcactggcctgtcccccaacatcctgatctgttttagtctggggtatgatttgggtgccagggtttttaaaagtgattttaagatgcagtgtggggggagaacctggggctcttatactctgggtctctctttgaacaaccctaatgtggatgacctgtcacctgtttaaggacatttcatggggctacaaatgtccccagatgaagttggagcacaggtggcatttcctcccaggagatcgtgggaccccactgctgacttctgggggttgtgcttctgtagtttaaagacttatctttgtatgaaaatgcagtgtgtcttggtttagtattctggtgacattggaaacaatgtgtcttggtttagtatcccggtgacattgggaataaattatgtgactgctttagaattaccttgttatttgtaaacaagttttgcagttgagctcagctgctgtgtgtggactggatggcagtacattgactttctccttagcctagtctgtgtgggcaaggtgagtattagaggtgattgtgctggatagagggcatctctgaaacctcaagagagctttgagtctcaaatggagacattagggtttttctgttctttctgcctccttacaaaagtgaggaagaccccgtacaattactagcacctaaaaaataccttttaataggaaacagggtctttggtctgacagttggttgtgtgtggatttgatgtcagtatggctttttttttttttttggagacacgatctcactctgtcacccaggctggagtgcagtggtgtgatcatggcttgccacagccttgacctcctgcgctcaggtgatcctcgctcctgagtagctgggaccacaggcgtgcaccaccacacctggctaatttttgttttggtagagatgggtttcactgtgttgcccaggctggtcttgaacccctgggctcaagtgatcctctcgccttggcctgccaaagtcctgggattataggcatgagccactatgcctggccccctgcagtgtgctatttttaacctgagcccctgaccctacctagttctgtcttgacgtaccggcacagaggcagagggatttctctacggcagtggttctcagtcctggctgtaccttagcatcacctgggaagctttaacagctactcacgcctgggtcccacccacagagaaccactttaattagacatcctggggacatctggcaaagtaaagactcccaggtggttctgatgttcagctggtgttgaaaaccacatcgctaaggactgttaaacctgaggaatagcacctgtgggccatcgggagtggattttcccatttgagcaccttcaagcagggccatgcaacgaaacaaaggacagatgtgtcttcttctcactgttctctctgctcacgccaccgttcatcagactctagtccatggtcagaactcagcgtgcttgtagatgagataatgggatgtttgtctaatggccgccttccatcccctttagtggtgtgatactgaggatcactgacatgataaatggtgcttgtgtttgcatttttgtccctaaggagagttttgaggcattcttttgatagactgtttagcctttaatgaggaaataaaattaacaaaatcagggtggggtgggtgtgatggaacaagttaaaacaagagcagccacgcaagactgtagggagaaatttctgaacttgcttaaaaatacaatctctccttccctgctctcaaaccttgcatcagcttgctttttggtgcgggagtaatgtgcggatttaaggttgtgccagactcaggctctgcactagtcaggaacacagacacagaggagagttacatattttgcttctggtccttcttgcattgcatgaaatattcagtaaatgtggctgtcctgagaatgacaatgggccttttaataggctgagctaatgagcagtcagttaggccctatctagtttggattagctttcaaacatcaggagtttagaaatcgggaaaattaatttactgggacatctgcaaagtacattctttaagtttcctagaagtttcctaatctttcctagaaagattaatcagattaatccaagctttcccatgggaacatgctcttcctggctgaacatggcagccataggtttcgtgccctgttggtgaccctgtgttatgatagccttggacatggtctgagagtagccttgccggctcttgtaggtgaggagaagtctaagaaacttcctccatgaagcactcagtgtacttgaaaggtgaacctaggtgagccgctgtgctgagtagggttttatgtctgagcagggttggtggctagaaggactgacacggcaaaggccatctgggaactgtttctttcccttggatactactgaggttgcatttctaatggtctttggggcttcaggcgaggggacaggctgatcctgtttcctacattgctccttattttgggggcctgataaactgatccataaaatagcactccaggttggaacttggcaaactaaaatggtaccttggatattttgaaatgttccttgatttttaaaaagttactttgacttcaaacgttctaatcttccttctgtgcttgttttaatttctccattatgattcagtttagaatcttcctcccagcattttcatactcttaagtaactatgaatcttcctctcctcccccatggtgtatttcacatgtgtgtggtagaagtagatggtgaaatagaagagtgattttcccttggcctttgcagtataggaatcctgcaacatgctgagtggtggtgagctcactggaacgtgattatgcctccagctgtggtttctgtgaagcactgatgtctactttataggttaagttctgttatcattgtttcaaaaaatcattgtggttattttttagtattgtttgttcatttatagcattataaaggtaatgtcaatgagtatttggtggatactataactctgtagaaactgcgcattgctaatttatgcaagaatttgcacgtataatacgtgtatatcctctgtagtgcacagttggtcaggtcttgtgctttgtaccaattatgcctagtgttccattattggaacgctaagcttgtgggagttatttataccctactgctcaaggtcatcgccaaggtctgagttttcacaaaaaaaatgtgcaacctctggcataaatgggttaagattcattcggttggaaatgacagaaatgaaactgacttaaacactaaagacatcattgacatgagttcatggagctgatgagtaaagcaggaggttggacatcaggtaacacttacccaagcttcacttctctgcggtcacttctttgtatgacaccctctgtcctcacctggctccgcttagggtgaccaagaggcagctaggatgaggtcaacccttctttttaattaggatgagggggtcaaacgttctgtttaattgggatttgaagtgggttggcttggattgggtttgccactagctgcaaaggtttatggcaggcttaggtctctccccataaagagcgtaggtgccagtactcatgtgactatgcagataccactctgtttccatccctgtcctgacttttgccagccatcacacacttggtaaaagtctggagtagatttaggacatctcaaatccaggtgtaatccattattacagcccacacagttaacaattggctgtttcctccttatttccacagcttagatgctaatgagctcctcattccacctgtgccccagggataactgtagctgatctttgctcagcaagggccaatccctctgaaatttggttcctctacacttctttgagaccgtagctctcccagtggataaaataaaatatgattttgtagtgtatccagtgttctttgctgtaaaagtggtagttggagtctttcctgtccttctacatcttaactggaagcagaacctaaaaggaatggcattaaattgctactttgagtttctttaagttaatattttaaacatttatttgcatataaatgttaactctataagtagacatcaatagtttaagaattattattccgcaaagagaaaaaagaaccatggtagaggcgcaattctgttccctttgctgtaaccccagaaaaagagtcccttgatgtctctgtgcttctgtgtgtggagcgaagaggctgctccaaagctgcacagacccaggggcttaaccgaaatttattgttttgttggtatttattattcatagttctggaggccaaaagtgtgggatcaaggcgttgacagggttggttccttctgaggctatgaggaaaggatctgttccaggcttctctccttggcttgcagatggctattgtgttagtcgatttgtgttgcctgaaggaatacctgaggctgggtaatttatacagaaaagaggtttattttggctcagagttctgcagcgtctacataaagcatagtgtcagtgtctgtttctggtggaagatgaaggggagccagcgtgtcacatggggagagaagggagcaagagagaagggaacgagagagagcgaagaggtgagggtcgttttaaacagccaactcttgcatgaactaatggagtgagaactcactcatcaccacggggatggcactaagccattcatgagggatccgccacctcccactaggctccacctccagcattgggcagcatgtttcattatgagatctggaggggacacacatccaaaccgtattggccgtcctctccctgtgtcttcacatggtcttatctctctgcatgtctccgtccaaatttcctcttaggaggatcccagtcattggattagggcccactgttgtgctttattttaacttagttacctctgtaaaaaccctatctgcaaatgcaaccacattctaaggtcctgggggttaggacttcaacataggaatctggcagggttctggagtggtgggcaggggtgtggtgcatagttcaagccacacagcctctgttttcttacctgcaccatggggtggtgatgtctgttgtaggataattgcggaggaacactgagaaccaggggtgctgtaaccacctccagccactctggagggcatgttcaagcgaaccgtcataaatgtctaaaaggtaaaaatcacatttacaggaaactagaagtgggccacacaaagggaccctgtctgtaacaatagacaccatcgttggctggtcagctattcagttacactcttgataacaatttgaggggctgtgtaagctcaggcaagttagaatggtgccaccctctctgagcttcagtttccttgtaatgtcatctacctcttagggcttttgtgagtattaaatgagttaatgcagacttgccacttagggccagtccatgttggctattgctgcagctgctgtggttataattcacctgctcatttttgactattgaggagaccacttcaatgccctttttctgtattaagtcagggagagagagggcctgcagagcactaagctgggagctagagactctcattagtattcttgaatctgccatccttgcctcttgagcaaatccacaagaaatcaaggaatcttagtatttgtagacaggaagttatgcttcccttctcactgaccctccggactctggtgagatttgcatactatggcgaacatgacatagtatggtccttgcctccagagaacttagggtttggtgggggagataggcagtaaagacataaatgaatgtagcaggtgtaaattattttgaattatgaaataatttacaacaggcaaaacacaaaaaagaaacctgcgtatccagtattcagacctaccctatgttaacatgtggtcagatttgcttcagagctttttttttctatttatttatttatttgagacggagtctcactctgtcaccctggctagagtgtagtggcgtgatctcggctcactgcaaaatctgtctcccgggttcaagtgattctcctgcctcagcctcccaagtagctgggaccacaggtgcccaccagcacgcccgactgatttctgtacttttagtagagatggggtttcgccatgttggccagggtggtcttgaactcctgacctcaggtgatctgcctgcctcggcctcccaaagtgctgggatgctttcttcttttttttttttttttgagagaaaggaacgtttacggatgtgactgatggcgttctcccctccacccactatcatggctctggcttattccccggaagcaaccaccagactgacctgacataggggaccccttcctttccatgtttttttgtacttttatagcgattatgatatatagtcataaactgcatactgtattgttttgtatgttttaaaattcacataaatgattttatgctgtgcagcttgcatttatcactcacagtcatgtcttctagatttatccatcttaataaatgcaaatctagttcatttatctttattgcagagttttgtctattaaccttttcgaagaactggcttggttttgtttttatttttgaatttctatttgtatctttattttttttcctttattccttttttaaatgttctctaggtttattcctattgctttttccctaacttcttgagtagaatacctagctcagtaaattttactatcttcatatttaatttctgtatttaaggctactcatttccctgtaagcacacctgtaggggcatacaaattttcatatgtaatatttctagtacccacttctaaatagtctgtaatttccacataccttttccctaaagaggcagtacagtatagtggtaagaatttagacacaagtttactggatttgatttcctgtctctaccactagcttgagtgaccttgggttatttatttaacccctttaaagtgtctcaatttctttatttgtaaaagggtgataatgcttgcatgtattttataaaattaagatgattaagttaatatatgtaaacacagcatgtggcagaaagtaaatattatgctataaattaattgaatttttattttttcatataatttttttggtatctttacaacatgatttataattcttttttttttttttttttttgagacggagtctcgctgtctcccgggctggagttcagtggcacaatctcagctcactgcaagctccgcctcccgggtccatgccattctcctgcctcagcctcctgagtagctgggactacaggtgcccgccaccacgcctggctaattttttgtatttttagtagagatgggctttcaccatgttgaccaggatggtcttgatctcctgacctcgtgatctgtctgcctcagcctcccaaagtgctgggattacaggtgtgagccaccacgcctggccaatttataattctgtgtataacaatggagaatgtggtgcatatgatatttccattttttaagtagtgtcagtatttctgctgcaatttcctgtcttttcatccatcatgagcacattttcctttaagtccttgagcattatggtaataattgcttcaaaattcttgtctgctattctaacatctgggtcatcttcgggtttggtctacattgattgtcttttctcttaaaaaggggtcacattttccaagttattcatgtgtcaagtaattttggattgtgttctggatattgtaaatgtaacgtggagattctgaattctattactctggagagtattttagctggcaattaattttgttggactcagactgcagaatttgtatcttgggtggcaactcaaatctcagttcttttattcttaactagactcttttccatgtaggcatcatcctgagagttgggtagaatttatatacagaattttcggcttcccctttgtggatctctcctttccagcatgcctcccccatactttccagtcaccttgttgccctgcactctgtcctctggttcttcagatcacaggggctgcaagctttctgttggagcgttaccccttctgcatggcactgaccaggccttccctcagtctcctgtgctgttcctgtcttccaagtgttgactccacccacatcttccaaccttcaggtgtttggatttttgtatttttttcaagtttacagttgctatctgtaggaggattaggtttattagaagcttttgagcatactgaattccgtatgtcattgatttactggtagtggtagagatttgcatcgtggcctagaacatagatgtttttgttttaataaatgttttatgtataaatgaaaagagtacataatctcaaattactgcaaacagattatatattttctaattgttgtgttctatatgcccatttactgaagttagtgtgatgtcagaatcatttatagtctcattattttggacctgcttgatttgttttagagatatattaaaaatctcataacttattgtggcttggccagttttaccttttaattctattgatctctgctttgtaagttgtgaggcagtattgtttggtgcacacaggtgtatgagctgtacggctggtgagccattccttttatcatcatgtaatgggccatttttatccctgccaatacttttgtccttccagatgttttcagctaacgttagtattgccagtcaggttttattttggtaaatgtttgcttgatgtttcttttcccttagttttattttcagtcattctctgtcatgatgatgtacgtatgtttcttaaaagtaagatatatttgaattttttaaaaaatgtcaaatttgggaatatgttttttcattggcagagttagtgttttcatgtttctagtattgctagaattcattttatttattttatctgtttactataccatgctttttctttgcttctgtttctctttgttgttgtttgtttgtttctattggcttgaccaacttttaaaaaaaatttccccttctctcttccactggtgtggaaatttgataatctattaaaattttgttgttgttgccttaaaaatatataaaggaagtctgaggcatcaggtttccttcattgataatataaaagccttcaaatgctttatcttgattttacacgttatttttatctgttaatttaaccacattttgtctttgtctcttcccaatgaatggtaatcatgtttttgcagttagaattatttagatttactgatatctttgtcagcttgctcagtattgtttcttgcaaccctcttccctgggcttaatgtccttgaagaacatttttaaatgagggtttgcaaatggctaaattattatttttgctttgtccaaactgtctttattttacctttactctttttttcttcttttgagacagagtcttgctctgtctcccatgctggagtgcagtggcgcgatcttggttcactgcaacctctgcctcccaggcttaagggatcctcctaccttaacctttcgagtagctgggactacaggcatgcgccaccacacccggctaatttttagtatatttttagagacagggtttcaccatgtagcccaggctggtcgccatctcctggaactaagcaattggcccgcctcggcctcccaaagtgctgggactacaggtgtgggccatggtgttcagcctccgcccttattcttagtgacgatttatccaaatgtggaatcctaggttgagtcttcacactttaaagatactattgtactgtgttcagactgctatttttgttacaaaaggtcctctgcccctctgattttagattctgtgtaatgctctgccttctctctgtgcaggactgttgttgggttctgcagcatttcccgtggacttcccatgtttattctgtttgggacttgtcgtgattttcccagcctccctctcgtggagacgtgcctcttcccattacctacgtcttctcctggaattcctagttgatatatgtggatcttactattttttcctccatgttttgtgtcatctttttgcgtttttggtctccatctctgtgttctctgttctagagaatttcctgtcatcggtttctcagttcaccagatttttcttaaactacgtctgatctccatttaatcttctactgagtttttaattttcgcaattatattcaatacttttagaagttatatctgattcttttccactgctgtcttttttatagtgtcctattctttcatgatgctgttacctttcctttatcactttagatcttttatgtatttatttttttgagacagagtttcgctcttgctgcccaggctggagtgcagtggcaggatctcagctcaccgcaacctctgcttcctgggttcaagcaattctcctgcctcagcctcctgagtggctgggattataggtgtgagccaccgcgccccacctagatcttcttagtataattatttgaagtcttttttgagtgattccaccttctgaatttcttttctttttctcgagatggagtctctctctgtcgcccaggttggagtgcagtggtacggtcttgactcactgtaacctccacttcctgggttcaagcgattctcttgcctcagcctccgagtagccgggactacaggtgcgtgccaccatgcccagctaatttttttgtatttttagtagagacggggtttcgccatgttggccaggctgttctcaaactcctgaccttgagatctgcttgcgtcggcctccctaagtgctgggattacaggcgtgagccactgcccagccagcttctgaatttcttgaggagtgtcagctcacactccctttcacatgtggattgtaattttataccgtgagctcaaattctgctgatgtgttctccctcctgccctgcttccctgggaatttctaatggcaggactttcaaggtaggccctcagcccctctggcttttgggtcactgctgaaaagcacacgtcccatttacaggacactgtcctttgctctgctcttggctgcttcagccttggctcaaggccaccccctgcccccagtgctattctaccctctttgggagtcccctatgccctgcattatggaaaagtcttcactgagtcatttcatatgcacttctgccagatgccccagggctcttccacaagtgcacatgtcatctctccttcagtgcttatccttaggccatcggaagcacaggatgatctacttgtgtgtgtagcacaggcttggggatttgtactggggaccctgcccatgtcccgctggtatcctgaactctgaatgcagacagacttccctgcacccctgtgccatgggcggggttgtccagccactctggggtcctggccagattcccccatctccgtgttgtaggttaacattggcccttcacccagtaggccaatatttgagcccaacaactgctggattgttgaggtctcagatcattcactcacttacaggcgtgagatttcttcacctttctggaacaggagattttcccgtttgtttattttgcatttgcctaaggaatggtcttagtctgtttgggctgctataacaaaaactgtcagctagatagttcataaacaacagaaatttatttcttacagttctacagtctgggaagcccaagatcaaggtactagcagcctcagtgtctggtgaggggcctgctctctgcttcacagatggtgccttctctctgtgtcctcacctgggggaaggggctagctggctctctggagactctcttataagggcactaataccattcatgagggccccaccctcatgacctaatcacctcccaaaggcttcaccttccaacaccatcacattgtaggttaggtctcaatgtctgaatttgagggggacataaacactcagaccatacctggtattaaaaaactataagggggggcgggtgttagattttgtctggtaaatctaggtccttcttgttgtctgactctgtttcatgaattattcatgaatgatttacccctcatgaaacagtgtgactgtttcattccttggactcaggcgtgtcagaaatgtcatcgtctcatcatctgaaagtcagatcatgcactctgacccgtcacctcagtcattgatggaggccttcccttccatgtcctgcaaatgtccctggggctttgtaatggcaggactttcaagacaggccctcagtccctctggcattcgggtcgctactgaaaagcacatgtcccattcacaggacgctgtcctatgctctgctcttggccgcttcagccttggcccctcaactcacggctgccccctgcccctggtgttactcttttgggagctcaggtttcagaaactaaaccaggaatggtggctgtgcccagctttatgcccagcaaggcacccatggcagaggaacagaaaggctaccttgtcaccataacatgagaagaaaaccacatgcatgcctcgtaagtcagcagagcaagcacttactatttcttttgctgacctcaagtccaagcattgtctctttttctcagtgttgtcccccccaaaatgctcaacatttgttccctggggccacacacctcgcatggtgtttcttgcgtgccctgcgagagcacagccctgtggcatttctgatgtgtccccaccggctcatctggagggatctggagctgatgttaggggtcagctgagcgagggtccatcctggaagaacagagggtcaagcagaccctctgctcctttgaggctgggaacctgggtcctcatttcctgtctccctggtgctcatggggcagaggcactgtggaagtcaccagataattgtttctgggacttcagtgctttccagagaagcccatggggccccttttacaccctgagtgttcagtcgtcatcattactacgtttgccattgtcttccaagcttgtgcctcacaagctttgaggagaagctcagaccctgccgtttggttgatatgaactatgtctttatccaagtccctccatcccatttttatgtgttttttagacaaacgactgaggaaatcttaggatttttttttgaggtgtcgggtgagtggacacttaccctttaggaaggggtgttgtgctgataattcgtaattaccctttggggagaataaagctaaaacccaaccatatcactctaaaaactatgatgattgctgttattattccccggaggctgtatgaccgtgtggagcctgtcagatactgtaaaagggacatttcctgctgcccacctgtgtgactgggaatggacacagccatggatgggcctagtggccttgggcagggcctgcccctacttcccagcacgtagaggctgggacaagtcagcctgtttctcctattcctacctttcctcatctctgagagagagggaatgcatgtcttgatatatttgcttctccaggttgcaagttaaattgagttaaatgaactcatgcaaatgcaatttcatgaagtagaaagtattattaaaatgtaaggtgtcatctctctatggaaaacttccatagagtgggtttcccaaaagccaagcctgggatgaggacttgggtgcaggtggtcagtgtcagggagggagggggttccaggaagcaggagagagagacagggcagaggaaaatccactggcatccagtggaaaatccaccggaaggggagtgagtgtgtgtcaagattgttgctgcaggcaatgggcttgattccgaagggaacactggagtgtgcacagaaggctccccagacgtgacccacggatggcgagaatggaagtgtgatccgggggttcttggctcccaaatttctgagatgctcctgtgcaggccaagggagtgggcttctaggcaagaaaacctgtaaaaaatcaaaggccagcgtcacatgcttgaggaggggctgggccagctgcactgccaccacagctatggcagaagttggggtggcatggtacctcaggagggcatcctggggaggcagccagtggcagattccatcaatgcacagtgctggggccctaaccctctcaaaatgctagtaacttaagaaagtttgttactttctaaaaaaccttgtgtagtcagttaaaaaaatttcttcctgcatgaacaacctgttgatctatgccatattccttccatccttcctactttgtaaaaatagagtcattccacaaagcagcttggagatttcctcgggagtgttcaaggcttggccaaagtgagcctcttaggctctgcaagggcctctcgccttggagggacaccctctgcccccgtggttccctccagtggtccctgctttctgggctgatctggagacaattggaaatggataagccaggcctggggcagtgtttaaatgaggcttcatgtaagtatgagttaaattctgtatacttttaagctttcagtgactgtgtgtgagtgtgtgtgtctttaaagttgtcttttagtgtatttttaggcctctgtaattttttttaaaattttttgtggacgcaggggtctcattgtgttgcctaggctggtggcaaactcctggactggattggtccacccacctcagcctcccagaatgctgggattataggtgtgagccatcacagctggcaggcttctgcatttacacttgtaacgtgccctcttatctagggcagtgatgcagtgatgtatttgcttgactaatgttcctttatgctgtgttaagccctgttctgagcactggagatcctaagagacagatgtccctgccctcacacagccaccctccttgagatcggccgatcaccagtgttgttctgtcccctgatcagtttctgatttccctgcagtgttccctgggaagggtggggggagagaaaagaggggtgaaccgagtcagcaggctggcagccgaggctgccgcaggaagcagcagtgcccctgcacggtggactccttatccctgcagtggatacctggggcagaggacgaaggtcccgcccacctgccacgctgcctgcctgcctcccggcctccagcccagcattcctagcatccttgcttttacctctgagatcaggtgggttctgtggactgatgtctcccacctgggacctgccccaggtcatgccattacaacagagccggcggggtttgcccccttgtccctcagaggcatttgacaataaggacccctcactccttgtgcctccttcagttcccggtttataaaatgcactctccagggacggtcggctcctcttctgcaccttcttccaaacagggtgtcccaggtctctgctgctctttttctcactgccttgggatccttcctggctccagctgggagcagtcccactcggcatatctcccactctgtccccagcctcctgtctttgtggctggctgcaggcactgtccattcccaataacttggtgtttctgaaccaaagtcttgtctgacgatgcctgtccatgttctcaccagttttttttccagtcacccagactcaaaaataactctttgctctgttatccttgtcccctttacttgtacaatattctcccatacttttggtttgcttcttattttggtatactgtagtagcaaagagctttggtatatctgtcacccgaattcactgatgagcatttttctctctttatggtgttctctctctcttccctctttcaaccctctctttcgtattccaaccctttctccctccacacatattttgttctgaaccacttgagactaatttgctgacatcatgtccctttatctatacatacaaattttcttagaacccttatttaacgtaaggatagacttaggggatacaatactgttatctaatacgccatttgcatttccatttttccagttgtcacagtaatgtcttttatagctttcttttcttggtacagaatccagtctagactcacatattgcatttagctgtcatgtcttccgagtcttctccaatctgggttaattcctttgtatttgtctttcctgatcttcacattttttccccaaaatattagtatagactagttattttgtaggatgtctttaaatttggttttgtctgacgtttcttcatggtgacatttggggtggttttgtctgacgtttcttcatggtgacgtttggggtggttttgtctgacgtttcttcatggtgacgtttggggtggttttgtctgacgtttcttcatggtgacgtttggggtggttttgtctgacgtttcttcatggtgacgtttggggtggttttgtctgacgtttcttcatggtgacgtttggggtggttttgtctgacgtttcttcatggtgacgtttgggatggttttgtctgacgtttcttcatggtgacgtttggggtggttttgtctgacgtttcttcatggtgacgtttggggtggttttgtctgacgtttcttcatggtgacatttggggtgtacgtgtccagcaagaaagcagtgatgttgtgttctgctcagtgcatcttatcaggaggcacatgctgtatgtctgtcccattattggggatgtcaacttctgttacttggccaaggttgtgtttagctgcatggagttgtagattcttattttacctcatgaatattcattctacatttatttatttagatgcccaaacggtctcagatttggcccgtgtgggtgtattttttaaaattggacatgggtatcaaatcttccaaacacttttgcaacatcatggaggcttgcatataatttttctgcatagatatattaatgtggcatattatgtaaatagttttctaatgttatgacaaccttaaattctggaataaatctcatttggttgtggtgtattctttcctcagagtgttattgcattctgtttgctagtgttttatttaggctctttgcatccatattcatatgtgatattgccctataatattgttttgtgtgtgtgtgttattttcagtttagatattagtattatagctccatgaaaagaagtatggaagctttcatttatttttggtgctctgaaacaatttatgaaccatggaagctattggttttgtagaggtttagtagaatcccccgtggagccatctcagattaatgcttttttgtgactatagttgcttcataactttctccctttcttccgtgaaaattgatctgtttaagctttgtatgcttatgggatcaattttggtaaattgtattttcctagaaaattgtatctagattttccaatttaaatgtgtaagggcctccctttatttatgtattattacttaatggaggtcaccctagattgcacatccctaggtcacagggcctttggtacattaaagttatacttaggctcatgggactgtatggagtgacctttttgtgtctatctttgtactgctcttgaaaatctctcttggttttggaggcccaatttggatgtcaccttctccagaaagtccaccctgattgcctcatttggttttctgtaatcctgaagtgctttgctgactcctgaagggctgagcatcacactgtatctgcagttcattgtcttcattgtatccaaggcattctggcaggaaggcaagactcaggcattactttcttattaccgctctaacaaattaccacaaacttagtgttgtaaaataacacaaatatattatcttacggctctggaggtcagaagtctgcaatcagtttcactggggtaaaatcaaagtgtcagcaggccttcattccttctggaggttccaggggagaatctgtttcctcattttttccagctcccagaggctgcctgcattccttggctcatggcctcttccccctccttcaaagtcagcagtggctgttgagtctttttcacactgcgtcactctgacaattctcttctgtagtcagatttccctctgcctccctcatctaaagacccatcaaagccacccagataatccaggataacgtgtgcatctcaaaaccttagctggatcacatttgcaaagccccgtttaccatgtaagttcacattttcgtaggttctggggattaggatgtggacatccttggggtgttgggaggccatgagctcactcagccgtctggcccatggccttctggggacgaccatccctcctgcagcctcagggctgggccagctgccaggagcttccctgagccacctggacagccccagccagcatgcactttaaataataaaccatgcattcttgatccgtctactgcaacacataaagaagtttccttttttctcccacgagtctaagcatggcaatcacagtcaatattaagtattttttttttttcctttttcacttatctgttggacatgttctctctgagaacccagatgtgaggctagggcaggcacctcttcttgaatattacttgattaagaaagaaaagctaaaatctaaacattgaaacaaaaaataaaagggtatgatgccattttttgtgtgtgcgcatatgtgtctgaatcctttttcccacatgcagctccaccaaacagaggaattggacaagaagtggtgtcggctcttcccagttctcccctggactcttatgcaacacacgcccgccccactttagtaactcaaagcagagaaggcctccagcttaaataggaaaatctgcctcgagctgcagacggatcaagaattcatagtttattatttaaagtgcacactggctggggctgtccaggtggctcagggaagctcctggcagctggtccagccctgaggctggaggagggatggtggcccccagaaggccatgggccaggcggctgagtgagcgcatggcctcggtgctggcttggtgttgcagggggcggtgggggtggagagagaggtccctgccagctcccgcagtagtgtctgatttttgaatcagcggcgttcatgttccctccaagggagagagccgggagaatgtgtgactgagagtgcacacccggcttccctcccggcaggaggcctctggccaaaaagtccacccgaggcaagggaaggagaacagacactctggtctttttaagaaatggctttcgggttacattttttcctctgcaaaaaggtctagccttctcagtacatgaatttctcatggaaaagcctagcagaaagtctcaccgggacagctgctgcccagttttgttgagcgttttccagctgcagatgcagtgggtccttttgcaaagcctgctttccaaagcaacaggcaatttcatgtgcacgaccagacagagaatttgcctgctggaacctgtatggggttgcacaaactggctttgggctgaaggagctggtacctttctcaatccattagcaagtcgtagatcaaaccccctgccgtggcgtttggatggagctggacaatgaagcttaggggaaaagcccagtaaagccgggagtgttcccacccagtggagcagaaaacgtcaggcgtcactggtggtcggctttggtggtggtgtggatgcaacctgggaccagctgtgaagggacagaggtctcgctcacatctgctgcaggggaccttctgctctggtgtccacactgcaccctgtgcttaggcgtgctccagaattggggagcagaaagggacctttcttctctgtaagcgaagagacacagcttataggttggggtcccgtggatttcttaggaagccagtgcttggcctgctgggcccctgcgaagggaatgagccattctttgtgtcaatatttaaagaaatacaacacactcctagaagataaactgtttccactgctgccagggatgtggctgcttctctcactgtgcttttgggggatgctttattacccctcctctccctgtgtggggctgatggtcgacagcgggcacagcttaggttcggagtctcctgcctgctttgtccctgggggtatcatctgaatggtgtttggcctgttggtttcctttctgggaggcagttaatcatcttgttggtgcagagtgttcagcggcacatccgtgaatttctgtcacgggcctgcttggctcgcctctgagtttgaaaagctgcctgccttagtataaatatgcatttcccagcctcgaggacggctcggctgttgcagtgacaagagcatctgtgcatccctcggggcacattgtcccttgccggcaggtgatctgcctcaaatcttcctgtttcctatccctgacgcctttccctgaagctgcccctgcaagggtcctggggtctctgctgtgtttgcttcatcacgtgtgtacaggcgttggctactgtggtcgggggcagcagggagagagagtgcccagaacaggcttggccacacagacccccaggcagttggggtgggcccagagttctggaggagaggaggaaagaggtcatgatggcgatttggggatgctccctggggaagcaagatatgagccaggcattgaaactgctgggcttcacgtggattccagagaaagggcatggcttgtgtcatctgtgcctttgtacgttgtccacatgcctggcacgttgtaggcttcagaaatctcaagaagcccatgggaatgggtttgggattagagaggactctgcggcagccagggtggtgagacaggcaccagactgaggcaggccagagcttgagtcctgtctcgaaatccatcctcactgagggggcttgggcagggggcacccccgaggttgcagtgggttccatcccagcgccgaccaccatcacagctgtggggaatagccattccattttttgtgcgtttttgagacagggtgtcgccctgtcacccagtctggagtgcagtggcacaatcacagctcactgcagcctcgaccttcctcgagcgatcctcccacactcgcccccacatgcctccgagtacctgggttcagaggtgtgtgccaccacgcccagctgattatttttttgtggagatgaggtctcactgtgctgcccaggattttcgtgaactcctgggctcaatcctgccacctctgcctcccaaagtgctgggatcacaggcttgagccattgcccctggccacatggccattctgtgggcatgcagcgtccagcctctgtaagaatgaggaccatgttgttgagaacgtagctttctttgggacatctaagttgtgaaaatcagagttttccctgagcaagctgcccattttgctgtatttggggacccagaagtttgggaagaaacaggaacagggattgatggttgtgaatctggtgtggctttctcacctcatctgaccagggcacgaaaccccaagatatgcccagttgtgcatgagttgtgtccctctgtgtcccctggggtggcctttcctgctgcttagtcagactcccctggtgatgtacactgggttgtctcgtggagaaagtagccggcagaagaagccagggcaaacttggatggctaagcccgggattctgttttcctttcccattacttttttttcttttttcatgaatccaacactgacagtacagatttcttgaagacattccagtttcaaccatattaaagagtagttacttggagttatgatacatcagtaactacctaaaaagggaaagcatttagcaatagcaaaaaaaggaagctgttcaagttgtagcaagaatcttgttataattgcttccagcgtgaatgacgtgggcactttgctcaggaagcctgaggattctaccagcgagtgaacgatggtgttccctgcttgctttatctttggggattctgagatttacaactgtcgtcttttgcttttttccttccagttgtctgtggcaagcagccgctagcagcctgtgttccagacaactgaacataatttctggctgccagataaaataaaatgttttataataactttttgacaaggctggacgatcaagccttttgtggggtgtgtgtgagttgtctgtgtatgtgggagaaaaagcggagaccgttttgctccaggggtatgatgttttggtaatagatgtcattgaaaagttgttttaaaaagtgagacttctgtaaagtgggtcaaattttaaatgaagtagatgagcttaccgttttaaaggaagctggagtaaattctgtaaagtggagacgtttttggcaggatatgcaccagctgcttagaacgtactcgtaggttgaattttgtatttttcatagaaaaaacataattgcttgtctagggcagatttgtgatgattggactctttctgcagggcaccattatagatgagcaagactgtcgtccaggtgtggcagtgttggggctgtgtggtgggtggcaggtcccagcagggggtctgtgggaacccacactgttgtgctctttcagaagcttgtggaggacgccagccacacctggcactgcacgcggcacgtgacatcggctatctcattttctcctcctcaaatgctcagctgttttcatcacagtaaaacggcatggttcccattacagctggataaacatgaaggggcatttagggaccagaggcaggaggtctgcattgcttagccctctctccatctcaagctaagccagaaaaataaataaaagggaatttattgactcgtgtgaaaagcccatcaggtaatatgagctttagtcatggctggacccagggtttacagcagtgtggctggggcttccttgcttgctcttgccatctctttcttttgtttcactctgggtttacttaagtctcaggcaggtctttcctgatggcagcacagggggcccctggcagctgcagcttttgtggtccttggtgcctgtgaaccccgtcacaccaaactttgtgaaaggatttgagtggccctgcttgggtcacgtgcccagccctggactcatccctctgtccaagaagcagagtcttttttcctgtcctataacgtggtcatcacacagcattggggtagggctggtgatagacagcttcattggtttggtgtggtcctcagaagcaaagaggtgttctgttgcaggatggggcaaaactctagaagccctcttaggtggcctagataattttgtcaatctttgcctttttctcctgaacccagacttttgggatggcgtttgctcacaggcattcatgaagtgctcctcagtccctgccatggtcctctctcagcctcgttctcctttctgtcagggtcagcagaggaaggaagtcatgttcaagctgtgggctatgcttaggtgaaaggcccttctaagagcaattctttgggcctgtgttcttgcaggatgcccagttgcccaagtctgggttggctcaggtatttcaagggggtgctgcatccccgctttgggctttggaagcacagcagggcataagggtttctaccgagttcgagcatgggagaaacgaacaagttatggcgctgactgctgtctcagtccctgttgctgcacgatgagctaccccaaagctgagtcgtttgaaattgccattttaataagttcatagattctgtgggtcagggatttgacaaggcacggtggacatagcttttctcagttccacagtgtctgggcctcacctgggaggacttgaaatctggaggctggagtgatctggaggtgcctcattcatgtgtctggcctggaggtggatgacttgaagacaaggacaacaacgtggagcgtctacctgtggcctctgcagcttggcgtccataccttggtggcagacatacttcttctatggccaccagggctcccaatgcaagagttcccgcaagcccagcaggagctgtgctgcctttgaggatcagcctcagaaatcctagagcatcactctgaaggtactctgttggctgaagcggttagaaacctacccaggttcaagggcagagagatagaccccaccgctcaatgtcaaagaatttgggggccttatttaaaacctcttcacacctctataactgtaggtaggtgacaccgctagtgacaaagggctactgtgcagagggatcagagacagctcgaggagagagcatattccatagttcagagacagcataccgggtatggggctcttcagcccagctttggacattggtgtgcatcaactgtgggcattgggcctagagaaggctttggtgtcagagctgtggtgtagtcactctgagtgtccttggtcagttaattgattatagctttacggagataaaattaacatgcaataaactgaatatattcaaatgtacaatgtgatgagtttgtttaaatttatatatatttttagagatggtgtcttgccatgttgcctaggctggtcttgaactgggcccaagcagtcctcctgccttggcttcccaaagtgctgggattacaggtgtgagccaccatgactggcctaatgtgatgagttttgacatgtgaatgcatcagtaaaaccaccctcacgataagataacatatccggtagatccagatctaagtgtcctcagaatgtacagtctcagtctctggggcaagtgtaagaccccaccatggcccagcagaatggagtaggcagatgcctgtgagcccctgggtgcacctgcctgccctctagcagctgatctgagatgggacgtgaaccagggccatctagggggccttgtgcacacaggtcttggcactggcttttgccagcgctcttgtcgttggaatttgagtaaatacagcaaacccatctgaagacctgagtacaaataccacagcctttgagacggatttatttcagggaccagaaacagtttgaggaatctggcatcctaaataggtaaacaaataaacaaatctggcaagaagctagggcttctaagaaacaaagagccataaagaccaggttgagatgttaaaacaagcttaaaataaatgagacctggatgagataagctttataaggtgttttttttttctatagttgacctttgaacaatgtgcagggttgaggatgaagggtactgaccctccccctctgctcctgcaccacaacatgcagttgaaaatttcagtataacttttgactctccagaaacttaactgcttataggctgcgcttgactggaagtcttactgttaacataaacaatgggtattgtatactgtattctttcaatatagtaagctagagaaaagaaaatgttactaagaaaatcataagagaaaatatattcactatttattaagtggaagtagatcattacaaagatcttcatccttgtcatcttcatgctgagtaggtggaagagggagaggagaggttggtcttgctgtcttgggtggcagaggtgaaaatccatgtataagtgggcccgcacagttcaaacctgtgatattcaagggtcaactgtactacagtctgctacagcagaccaaaatgcacaaaggcggcagtacagagcagaaatggctttgtacatttgaattagcgatgagaataactgtgaggtagtccctcaggaggcaaaggaaagaagacagtggtgagaaagaaagtgctaggaatggattacagagaatggaaatccaatccagtaatccctgcagatggaacccttcccccaagacagaataggagcattgatcaaagatttataatgaatgaagacttcgggaagtttgaaacaaatctcagttttcaggataaaaggcttactgtgttgtagtcagaatgaatttacatggactcacagatttattctggcaaaatttgcgaattataaggttaaaaaaattatactagcattcaaacagacaaaacgggctactcaaaagaaatgaaaatccagcaggccacagagttatccatgttacggggtcccagaagacagtggagccaggagtccagtgcttggaggagaaggggttgtgccctaaggatgtgacactcagacaagttgttgttcaagagtacaggcaactgaggggtgcttttagctacctgagaggttcgagatgatatagcctggttgcctttgttctgggaaggattgtctgaagacatcactgcagttgattctgagctgaagtaaaattaagagattgggaatagggaagtcatgacataaagagctgattaaggccgggtgcggcggctcatgcctgtaatcccagcgctttgggaggccgaagcgggtggatcacctgaggtcaggagttggagaccagcctgcccaacgtggcgaaacgccgtctctactaaaaatacaaaaaattagccgggcgtggcggcatgcacctgtagtcccaactactcgggaggttgaggcagaagaatcgcttgaacctcccaggaggcagaggttgcaatgagctgagatcacaccactgcactccagcctgggcgacaagagagaaactccttctcaaaaaataaataaaataaaataaaataaattttaaaaaagctgattaaaactgttgagcagagtgaagcctaactgatacaaatataatcacatatggaatagaattaagaattaaggggagatcaaagacctaaatttaagagctaaaactatcagagtcttagaagcaaacatagatgtgagtatttgtggtctaggtttaggcgatggtttcttacatacggtacccaaagcacaagcaaccaaagaaaatatagataaattggacctcatgaaaattaaaaacttttgtgtcttaaaggataccatcaaaaaagtaaaaatacaactcatatgatgggagaagagttctttaaatcatatgtccggtaagagacttgtatttaaaatatataaagaattcttgtaactcagtgatagaatgacattgacttcaattaatggataaaggacttgaacagtgtatcagggttctctcgagggacagaactaatggaatatatatataatatatatgttacatatatattatatattttataaaggtaagtttatatatataaatttttatatttttatatatagtttatatataaatataaatatatatttataatatatattatatattttatatatataaagggaagtttattaagtattaactcacatgatcataaggtcccacaataggccatctgcaggctatggagtaaggagagccagtccaagttccaaaactgaagaacttggagtccgatgtttgaggacaggaagcatccagcatgggaaaaaatgtaggctgggaggccaggccagtttctcttctcacatttttctgcctgctttgtatcctaacctccctggcagggttaggattatgcccacctagattaagggtgggcctgcctttcgcagcccactgattcaaatgtgaatgtcctgtggcaatactctcacagacacacccaggatcaatactttgtattcttcaatccagtcaaattgacactcagtattaaccatcgcagatagttctctaaagaaggtatacaaatagacaataagcacctgcagagatgctcagcatcatcagccatcagggaaatgcaaatcaaaattacaatgaggtaccacctcactcctgcttggatggttatagtaaaaaagatagcaaatgttggcaaggatttcgaattctcatagactgctgttgagaatgtaaaatggtgcagttgttgaagaaaacagtctggaagttctttaaaagtttaagcatagaattactgtatgacttagccactccacctcatacatatccaaaagaaattaaaacatttatccacacagaaacttgagtaagaacgtccatagcagcattgttgataatagcttcaaagtggaaacaactcaaatgactgtcaatttgcgaattaaataaaatgtgtatagtcatacaatagaattttatttggcaataaaaaggaatgaagcactgatgcctgctgcagcatggatgaaccttgaacatgaaagtgaaagaaaccagacacagaagatcacatattatatgattctgttaatgtgaaatacccagaataggcaaatctggagacagaaagattaatggtttcttaggcctgagggtggggaaggacagaggaaaatggaaagtgattgcagggggttatggggtttctatttaggtgatgcaactgttctaaaaatgtgctgagtgcatatagttctgtgaatacactgaaaacaactgtatatgctaaatgggtgaattgtataatatatggatgatagcaataaagctgttataaaaattaagggaagatgtaaaacataaattaggatgctttaatagtaatttgtatctcaagtttatgaaatgttgacaaatcagaagtggaaagggatgtgggagaaaaaaagatgctaaattcttattcaaaagggaaaatcaaattgttcttgacttcgataatcagaaaactgtagagtaaaggttgtttcttaagatggtaaagataatttactagtagaatagcctacccaattactaaagatgataagcctaatgaaatataacttacataagctgggcgtggtgactcacgcctgtaatcccagcgctttgggaggctgaggtggatcacaacatcaggagatcaaccatcctggctaacacagtgaaaccccgtctctactaaatatacaaaaaaaaaaaaaaaaaaattagcccggtgtggtggtgggcgcctgtagtcccagctacttgggaggctgaggcaggagaatggtgtgaacctgggaggtggagcttgcagtgagctgagattacaccactgcacttcagcctgggcaacagagactccgtctcagaaaaatatatatatatatataactcacatagaacagtagagagagaaaaggaactaaaaacatgacagaagatcaaccattatcaacttttacaataaatataaaagtgttaaaatccccagttgaaatacaaggacttagaaatgagttaaaaagttaatgtaaaagcacaggtaaagatttaagcattaaacacaacttaaaaggtggtaaaactgggaataatatttaccatagtgctccaaaagtctagtattcttttatttgctctttcacttattttaaaactattccttgaatatccactgcatgctaggcactaggtttggagtggtgatccttgctcttgagcttcctgtgtggtggaagaggctaacattaaacacagaacaattaaatgatgacaaatagtgagtgctccaaggaaaagaaaaatgtgctattgtggtttagattaagggacccacaaaagcttctttgaggaagtggcacttggggtgtacatacaagttatgtgactgctggggataataactttccaggtggagctgcagcatgttccagaggccagggtgtggacaagagatgagatgctggaactcatgaaagcccatgtgatgatgtggtgccctcctagttggattttagaggaagccacaggaagctctaggaaatcaagaatgaggggttctagtgcatttgtgagttgcctaacaaggaattccgcctctctactcttggctggtttgctcaccctggtggagcccaaggctcctttgcacgtggaagcacttcaagaaatggctgacctggctgtcaaggaagcactgtcctcttggtaatccagtgggggcattggaaagttgggagtaggagtccagtgagctccatatcactgtgggtcagaaggaccatggctcaggtgactgcattttctgggcaggtcgttttgctctgaagggtccttggcatttgggaagggattctttgggaaagaatgccattctgatgatgggtctaggccaaaagggaaatattttgacttttttctcacccctaagcctatggttggttggttgagcactctctcttgtggtgtctctccctcttctatcttgagggacatctggggcttctgtgacactccagaggcctctggaggagtgaaggacacctgactgtaaacagccctgggcatgttggaggtatttgacacatttggaagaaaccctgactccagagccctacagggccaaggatttgttgttgcttgctaatcctctgaaaagaggactgaaggattgctttattcttttcttaatttgttcatttacttcattctgtcattaacttattcattcagaaacaatgactgaacaccacctgtgttcctggtgcccttctcagcacaagaggtacagaggagagagggctgttcccatcctcaaacctagcagcgtggggacacaacctcaggcccccgtagggtgtgcttggtgattttggggactgggggagaggtggctttgtgttaaagtgatgaaggtgaagagtgtgggttgctagtcacacaatggcctggcccctttgcataggtggaggaatttctgaggtgtctgaagtttctcttacatccttgtcaaagatgaaagaccatctgtcaaaagaaaccattcccaggatcccgatgggggattccaggtgcagagaagccgtcgatttcttttcaggcttttgtttgccctgtcttgctctggttgaaacgtgaacacattaattaatttcttcccccaagctgtgtgtttggggaatgttctttttttttttttttcttttccatcaatttagaaggtaaaactgtcaagctgctataggctagtgtaatctttcagcagtagactttgctgaaaagtggtggtgagaatcatgataattctaagtactggcgtttgttttttgcggatttgctgaatgtgtcttggtggggctgtgagatgactgtcctgcctgcgagtcccccgactgtcctgacggcggttacacacacacacaccctgacgtccgggcgtgcaaaggtggcctgcctcatccacacttcttgaggcagggaagatgagtatctgagtatcttatgggctaaattgtgtctcccccaagttcataggttgaagtactaactagcccagtaccttagaatgtgactgtttttgcagatggggtctttaaagaggtaattaagttaaaataaggtgatgaaggtgggtcccctaatctgatatgaccggtgtccttagacaaaaaggaaatttggacacagacatgtacagagggacaaccctgtgaggacaggaaggtgacagccacctacaagcaaaggagagaggcctggaacaagtccttccctcgtggccctctgaagaaaccaaccccactgactctttgatcttggacttccagcctctgggactgtgagaagtaaatttctttcatttaagtgcattgaatatttattagaggttgagacaaaggtttaagggtgatgcaaaattaaccagaaaatgtggtggtctcctttattttcggggtatcctgtgacagccagtctgaagcatttttactggactagactcagcttctcctgcatgatgctgcctggcattttctctctttctttgtgcatgtacttggtggtccagctttgttcttccctaatgcaatgtatatgatttccctttctttctccctccatttggaagccagctttccctggaagttctgtaccggttcctggatgtgtgtgcccaacacggttctgccatctggggtgtgtttatgggactgatgagtttttgcatgcaaaaacatgtaaacactcagatgagtttctccctccctctgggagagcacccagcgcagggtcgaccacagagtcggggcttgatgagggcttgcagagcgacagttgtcctttcccagttggtatgagtgcagtagaagcctcgttcttcctggctgggagtctggagctgacatcctcaaatgtggctggaaggggacagcagtagaaactgagggaggcagtcttcagtgggcctgggtttcttcattttatgtttcaattttttctcatttcaaggaaatcttcccttgactctaggaccttctagctgcattcctgtctctctcctccccagacttctccaaagtttgcgccatttcctcgcgggccaaacatgcattcaaccctctctagtctggttttcgcctgcatctgtccccacgagcactctcactgagaccccccacccccacaccgtgactccctgttgttcagtcagcccctccttccttccttcctgggcactctgctgtgttggagacgccacgcagccctgcctctcaggacttcactttccctggttcttgggatgtcatgctctgctcttgtcgtagcttggccttctttgtctctgtctctgtagtgttatttccatctcttctatctagccatgtggttttgaggtctctaaaggattcgtctggaactgatgattcctgaatgctgtgagctctgaggcattggaatgaagtattcccttgcttcttgagctcccaaatccgcacagccagcagccagcctgacatctccacctggatgcttctaaagcacctgaaactcaattaggccagaactcacagtgctttcttcctacctggccctattccagtggtccccaattcagtgactggtccccccattcatccaggtcagtgaggaattatccttgatggtgcctcttctttatccaaatagccccagtattgttccatcttcgaagtccctcctgaatctatttgcttcttcccacctgcagttgccttccttgtccagatattgtccgttttcaccttggcccatggagtagttatccaaccagtgtgccctggaatctcttctgcccacagaagccataaggacacattcagaacacaagccctaggtggcatccccctgctcccagaattaaagaagaaagctcttaacacatcccacatgaccctgcctgtttgccctgcccattgctccggcctccttggtgcctacgttctctcttgctcttgcctccttgcagtttctagaacataccgtgctttcttccacccctgggccctgtgtatatgctgttcccactctctggactcctcctagctcctctcccccacccctatctgttaactcctacttatctttccaaccttggcccttgcatcactgccttggggaaggctttcttgaacccccagggtaaattagggcccctccttatattttctcatagcattgtccactctttcttgatagtacctgtcacatgtagaatgtttaattcttctgttcatttggttaatgtctgctccttctagatgggcacctacattgtggcagtacctagcacacatgggttctcaataaatatttaactgaatgaatatctttcaacttcatctataggcagaggtgccctgcttggtatctacatggctgtaaccatggataggaaggtccagcccggcttccctaccctggcctgctgtattcaagaatgcaggcatgggtcatacctcctttctagtatggggactgattttagactccaaatttcatcaggtctgttttcatttgggatcttaatcatatatcgtaaatgcacgtgcgcgtgcatgcgcacacacacacatacacacacacacacacacacacaccccccctcaccccctccaaacaaaaaacccttattttccacctttctttgtaaggaatttacatgaaaaagatgccttttataaaaatgacttggtcttggaagttatttaaagaatgcaaacttggagagcaaaacttattttttgccttttggaaaaaaaaagaaagagaaggccattatgcttcaaggatgttggatttatgcagctgtggaaaacttcacctggctaggagttctgcacatgtggagccatcatttccagttaagaaggtgatttttctataaacagatcttttgcttttgttaaaaaaaaaaagtggtcacaaagcagttttcttggacctggcaatttcattggaaaacatgttgtttgcaagtgcgtgtgttcaaactcggtacgacacctgaaaacctgctgccggctcactgcttggcttgggtttccttctcgagtacgtttcccacattgaccccgaatctgttaagcactgtccccaggttcttagatgtgggtggtaggttgttgagaaatctgtggtacgctttgatactcttaattcccatcacaggacaccctattgactggtttttgttaaatggtgactcagaatataggccaactttcctgtctatggcagcattctgtagtgtggaagtacatattcaatatcctgatatttctatggtgaaaggaagtcaatccttagttccacacctgggaggagtctttgaagcttcaatgacatataggcactagtttaaggtctgaccttctctatgtcagcttgtgtctagccaggaaagctggaaccatgctaggtatttctaacagagggatttaacacagggaattggttatgtcagtgtcagtgtctgcacgagcaaagagggaagctgatataacccaggagataggtatcatcctagggctagagaaataaaaggtgaatttccaggatcacagagcgtgaaggagggggctgtggggctgtggcttatacctttgaagggacagaccatggagggagtatacccaagttggtgcctagatggctgcacctctgagggagcatggggaggctgggtcctgtaatagcccaagagctggaggctggaaccatagttgtcctgtatggttgtccctactgagctgaaaacacaaggaaccccatctcctcacctcctgcctttcattctccctctagtgccccctattgacagagctcagcaggaagccagctggcaaggtggtctgggaaatatattaatagttaggctgccagccccagagttatagagcagcgtgcagaagaggggctgggagacaagaggcagaatgggaaatggagacctttctgttcagtaaaacttcaagggcaccaagttgaggcctgggtgaatatctagggctcctgaacctcagtctgaagatattttgattatatcccatgctttttaagaaggtcaatgacacaagacagttggacatgcagggtaatccacatgtcttactatttttcatgctgcaattgtggtgactttggtgtcctgagaaagcactggtgtggctgggggcaggaggcagagggacagaaggctgatacacagaaagcccagttgttgcggccattggtctctctcccaaggagaaggactcatgcactctgcttcccaccttggtgagagacatttgattttcattttccccacctatgtaaaatgtcgctaacgtttcacggttcaaataggtggttttcacggacggccacattttgttttatcatgtttctgatgattacaacctccactccccctggaatgttgagatgttagagtgggatgttggggagcccctcttacaactggtattttgaggtagggtcttgctctgtcgcccatgctggagtgcagtggcacggtcatggctcaatgcatcatcagtctctgggctcaagtgatcctccgacctcagcctcctgagtcgccgggactacaagcacgtgccaccatccccagcttttttttttttttgcccacgctggtctcaaactcctaggcttgggggatccttctaccttggcctcacatagctctggggttacaggtatgagccactgcatctggtccaaaactgttatttttgtatcagttccaattcattttttttgtgatggagggtggccctaggagagaagttatttcatgcctcctgcagagtaggaaatacggaaggcaagtttttggtgagtgttcagactggagctcttggcagctggagaatatgaccattcagacctgtagtgttcataaaagcaatccaagtttgctatgtggttctggggacatgcaaaattttcaaatcagtacttagaccctaataattaacagcaataatgacagtgccatgcagatgatagaaataagacgagtggcatgatttggttgtgttgttatatatctgaccctatgttagaggctgagcgtgggcctcttaatcccacatctaccttaagagggcagaacgattatcatcttgccttatagacaaggaaactcacccactgtcaccctggaagtccatgggcagattctaaccagctctgtcagatgtcaaagttgggcaccttacgactagtgttgccccctcccttttaggtggaggaagtgactcgtatttcatttcaggacatttatgttaagtttcctaaaactgatcttgttattaggaatttcaaagagttttaaacaaatcgttcaataactatgcctattgaattactactgtaaaccacacagtgctaggtgttgggataggtccaaaggttaatgtttgggtccccgtagtctagtcaagaaggcaagtgtagactctcaaagtgcacagtaatagctgtgtagcctggaggaggagagctgggggtaggtggccaggaggcgttccaaggccccttgaggttggctgtctagacccccatcagtggtgggatggctgggggatcctggggcacactgggtgacctccagagttccagtcttctgtccagtctgttctgagaggttttgccattcccacggttacttctaatttataagtttgaatttgtttttgatggggcaggtacagaaaaaaaagcattatctccatccacacgttctatgtaacagccaagccctggggaccacagactctttgtacttaaagtgggctgcccattggggcccttcctaggtcatgccacccagtaaaaaacaggaccacctgccgaccagtgccattctgattcaggaaacaaaagtcaccacctcacctcttcctgccagcttgggccacctctgtcattggcctttcttggagttctgttccccccactcccatcctccccactttttcttggcccctcttctgggtgcgataataactctccctggaccaagggacccctgaggctaccgacttggaacacacagattgaacactttctggaattccctttgatgagtattttaattttaggccctttggcattttcgaaggttcctataagatataattaaacaaaattcatgatcgcatttgccataaaatgatgtcgacaatactgcctattgtatcaccagatggtccctctgtggggtcttccttggtgtttttatttgggaagttggtgtttggagaatattatctgtccctaaggaatggtatccttcgtcctgctggaagagaatgacaaacctataatccagcatgattctttttttccccctctggttttaggaaactcagaaccaaatttcagggcagaatgaatggtgataaggatgcctgggctggaatcccagtcaactaggttagtggtgttgggcaagatagttaacaaatctccttgtgcctcagtttgcacatctgtagaatgggatgtagtcctgactcagtgcttggtgggcagttctgtgcacatggggttagtatctctcataatttcacacggggttagtgtctctcataatttcacacggggtgagtgtctctcataatttctcacggggtgagtgtctctcataatttcacacggggtgagtgtctctcataatttcacacggggtgagtatctctcataatttcacacggggtgagtgtctctaacacggggtgagtgtctctaacggggtgagtgtctctcgtaatttcacacggggtgagcatctctcgtaatttcacacggggtgagtgtctctcgtaattccacacgggctgagtgtctctcgtagtttcacacgggctgagtgtctctcgtagattctcacgggctgagcgtctctcatagtttctcacggggtgagcgtctctcgtgattccccacggggtgagcgtgtctcgtgattccccacggggtgagcgtgtctcgtagtttcccacggggtgagcgtgtctcgtgactccccacgggctgagcgtctctcgtgactccccacgggctgagcgtctctcatgactccccacgggctgagcgtctctcgtgactccccacgggctgagcgtctctcgtgattccacacggggtgagtgtctcataatttttatcacgagagctaccgtgttgacctttagttggtatatttgtattttcttttcttttttaacttttattttagtttcaggggtacatgtgcaggtttgttacacaaataaatcgcatcgtgggggtttggtgtacatattatttcatcacctaggtaaataagcatagtacccgataggtcgttcacttctttgtggccatgtgtactgagtgtttaactcccacttataaatgagaacttgcagtatttggttttctgttctggtgttagttcgcttaggatgatggcctttcgctccatccatgtgctgcagaggacatgatctcattcttttttatggctgtatagtatttcctggtgtatatgtaccacattttgtttaccagtctaccattgataggcatctagattgattccaggtttttgctattgtgaatcgtgctgtgatgaacatacacgtgcatgggtcatcctgttagaatgatttatattcctttgggtatatactcaataatgggttgaatggtagttctgtgttaaaattctttgagaaatttccaaatttattttcatagtagctgaaactaatttacatttccaccagcagtgtataaagcatttccttttctctacaacctcgccagcatctgctagttttttactttttaacaatagccattctaactggtatgagatggtatctcattgtggttttggtttgcattcctctgatgattagtgatgttgagtaacttttcatatggttattggccacgtgtatgtcttcttttgaaaagtatctgttcctgtcctttgcccactttttaatgggatttgttttgtgcttgttaatttgcattccttatagattctgtatattagatctgtgtcagatacatagtttgcaaatatttcctctcagtctgtgggttgtgtgtttattctgttgataggttcttttgctgtgcaagggctctttggtttaattaggccccatttgtcaatttttgtttttgttgcaattgcttttggcatctttgtcatgaaatctttggtaaggagggcctatgtatagaatggtatttcctaggtttttttccagagtttttatagttttaggttttacatttaagcatttaatccatcccgagttaatttttgtatatggtgagaggaaggggtccaattttaatcttctgcaaataagttatttcagcaccatttattgaatagaaagtcctttccctagtgcttgtttttgttgtctttttcagagatcaggtagttgtaggtgtgcagctttatttctgggctctctattctgttccattggtctatgtgtctgtttttgtacaagtgccatgctgttttggttactctagccttgtagtatgtaaagtccggtaatgtcatgcctccttctttgttctttttgcttagaattgctttagctattcaggctctttcctggttccatatgaattttagaatagtttttttctaatcctgtgaagaatgtctttggtagtttgataggaataacattgaatctataaattgctttggacactatggctattttaacaatattgtttcttcctatccaagaccatggaatgattttccatttgtttgtgtcatctctgatttctttgagaagtgttttgtagttctcactgtagagattttgcgtgtccttggttagccttattcctgggtattttattttttgttgttgttattgttagtgggattgcattgatttgcactcatcttggatgtcattggtatatagaaatgctactgatttttgtgcattgattatatatctgaaactttgctggagttatcagatctaggagcttttgggggtagagattatgggatttctagttgtaaaatcataacgtctgcaagcagagatggtttgacttactctcttcctgtatgatgtcttttatttctttctcttgcctgaatgctctggctaggacttccagtactaggttgagtaggagccatgagagtgggcatccttgtcttgttacagttctcaagcggaatgctttcagcttctgcccattgagtatgatgggcggtgggtttgtcatagatggctcttactattttgaggtatgctccttcaatatgtagtttgtggagggtttttaacataaagggatgtggagttttatcacaagcctttttctgcatctattgagatgattatatggctttgggttttatttctgtttatgcgatgaatcacaattattgatttgcatatgttgaaccaaccttgcatcccaggaataaagcctggttgatcatggtgaattaggttttgatgtgttgctggattcagtttgctagtattttgttgaagatttttgcatctgtgttcatcaaggacattggccttaagagtgtgtgtgtgtgtgtgtgtgtgagtgtgtgtatgtgtgtatgtgtgtgtctgcaaggttttggcatcagaatgatgctgaccatatagaatgagttagggaggagtccctcctccttcatatttcataatgcttttagtaggaatggtaccagctcttctttatacatctggtagaatctggctgtgaatctgtctggtcctgggctttttctggttggtaggctttttattactgattcaattttggaacttggttttttcagggattcagtttcttcctgattcaattttgggagaatggatgtttccaggaattcatcagtttcttccaggttttctagtttgtgtgcatagaggtgttcatagtagtctttaaaagttttttgtatttctgtggagttagtggtaatgtcccctttgtcatttatgattgggtttatttggatcttctctttttttattggtctagctagaggtctaccaatcttatttactctttcaaagaacaaagctccggttttgttgatcttttgtttttcatgtctcaattttattcagttcagctgtgattttggttatttcttgtcttctgctagcattgaggttggtttactcttgtttttctagttcctcaaggtgtgatgtcagatcattaatttcatatctttctgacttttttgatgagagcatttggcatttaaataacttcattttctgctttagctgtctctcaaagattttggtatgttgtatcttttttctcattagtttcaaaaaattcattgatttctgccttaatttcactgtttccaggtgcagcttgtttaatttccatgtaattgtatggttttgagtgatcttcttagtattgatttctatttttattgcactgttctgacagtgtgactgatataattttgggttttttgtgaatgtgctgagaattgtcttatggctgattgtgtggtagattttagagtatgtggcatgtgcagatgagaagaatgtatactctgttgcttttgggcggagagttttgtagttgtctgttagatccatttggtcaagtgttgagttcacgtcctgaatatctttattagttttctgccttgatgatctatgtaatactgtcagtagggtgttgaagtctccagctgttactatgtattatctgtgtctctttgtaggtctctaagaaattgttttatgaatctgcttctgtgttgggtgcatatatatttggaatagttaagtgttcttgttgaattgaaccctttaccattatgtaatgcccttctttgtctttttaaaaaattattgttggcttaaagcctgttttgtctgaaattagaatagcaactcttgcttttttgttttgttttgttttccatttacttggtagatgtttctccatccctttactctgatcctgtgggtgtcactgcatgtgagatgggtctcttgaagacagcatacagttgtttcttgcttctttatccaacttgtcactttgtgacttttgactggggcctttagtttgtttatattcaaagctaatatcgatatatacagatttcttcctgtcatcatgttgctagctggttattacatagacttgattgtgtagttgctttatagtgtcaatggctatctacttaagtgcgtttttgtggtggccattaacagtcattcctttccatatttaacagtcccttaaggacatcttgtaaggcaggtctggtggtattaaattcccttagcatttgctttggtgaaaaggatcttatttctctttcacgtatgaagcttaatttggctggatatcaagttcttgattggagtacaggcctgtaatttctcctggcttatagaatttctgctgaaaggtctgctgttagcctgatggggttcccttcgtaggtgacctacctcttctccctagttgcctttaatattctttattttatgtcaaccttggagaatctgatgactgtgtgtcttggggatggtcatcttgtataggatctttcaggggttctctatttcctgaatttgaatgttgtcctctctagtgaggttgggggaattttcatggatgatatcctcaaatatgttttccctgttgcttgctttctctccttctctttcaaggatgccaacggctgatcgatttggtctctttacataattccatatttcttgaggttttattcattctttttttctttagcttgtctgcctgagttaattcagagaaccagtcttcgaactctgtgattccttcctcaacttggtgtatcctgctgttagtacttgcgattgcattatgaaattcttgtagtgagattttcagctccatcagatcttttttgttttttcttttgagatggagtcttgctgtgtcaccaggctggagtgtggtggcgtgatcttggctcactgcaacctctgcctcctgggttcaagtgattctcccacctcagcctcctgagtagctgggactacaggtgtgtgccaccacacccagctaatttttgtatttttagtagagacggggtttaaccaggttggccaggatggtctcgatctcttgaccttgtgatccgcccacttcggccttgcaaagtccatcagatctttcttataatggccgtttcatcttttagctcctgtatcattttgtattccttagattgggtttcaactttctcctgaatctcagtgatctttattgctctccatattctgaattctgtgtctgtcatttcagcctggttaagaaccatctagtgtggtcatttggaggtaagacactctggctttttgagttgccagtgtgtttatactgtatttttcccgtctgcatgggctgatgttcctttactctttgaagttgctgtcctttggatgggttttttttgatgcccttaggcatttgattgtggtataaggtgaactcagctgactggcttctattctggaagatttcagagggctaaggctcagctcagcacccatgggctctgtgctttaactctgaggtgccggtatgagtttcccagctttgttttctggtcccctgcagttagtaacctgatgcactggagaggctgaggtgttcccggtctgctggccccaacacttcgatgtggggtgctggccacagtacttcataggagcggtggaagtgggatctgtgcttgctcatatgtgccagcagccacggtggcatgtcagactgcctgtgcctcagcagcagtggagtcccagtggaggtgcgtagggcggtgggatgggctctgccatcagtggtagggcagcagggtgcacatgcacattcacgttttgcggggagggagggtgaagtctgccaatacgtgtgtgccggcaaagcagtgggagagatctgtgggtgagtgtttgctgacaaagtggtgggagaggctgcttgtgggctggtcgcgtcggtggaggctggtctgctggagctctccagtggttagctgccatctgcccatgaaggagctatgatgggccgcccctgggaagcaccctgttcgggcattgaaggctgtgctggaagctggtgtgaccatgctggggccctaggagaggctggcacatggtgggtggtgctcagatcagactgtcctcatcctatgggcaagaccaccctggtctgtgcaggtccagcagtcacccaaaggctgaagccacctagaagatcttggtaagacttgggggctgggcatccatggccatgctccactgtacctgttcccacgcaaaaccctctgggctccacacaggctggagtcctgcccctgccacctctctcagcagctctccctgccggctcaagcattcgtgcgggtcatgggatctcctgcagctaggatttcagaagtctgtggcaggagcaggctactccttgcctattcaactcaactcttccccaggtcttccttggaaatggcgttggtagaatttgagatgcagagattcttcttgtgtagcagaaagtaaaggaattctgagaggggttgtggttttgaattttcatgccaaatattttttgatctacgtattgtttttccctaataaatacctggatactgtatcctttctaaactaaagagtatctgttccatacagagctttgataattcacagttgagatagttgttgtttttattttttcagttttcaaagtggagaactagtaactacaatgacagtttatatatttgctcaacatttttggcagtccccaaacgtctagagtaaattgtaatttgaagattctaaaagtccatttctgtctttttctcttcatcttgttccagaaggatttgaggtatcttacataaatacataaaattttcttttctaatggataactgaggcaaagggaaagagatgtaagaaaaatagtatgaagccagagactgaaaattttccaagtcagtaccacctccagcaaggtgctggcaaaagaaactgctgggcttgccttcaagaatgcttcctggtgtctgtgacaacaggagaaggcttgaggcctgacctgactgcgatgtcctcatcagcggggcgagagccacccttcattcccacagcagctggagacagctggtcacgagcagagcttggagcactccccggctggccacacgcccacccacctgcactttgacctctctggtgaggtcagaatccagcacatgtgttattctgaaattagtgtttttcttcttacttttgaagttgctatcatctgtgaatattggcatctgtgcagcattatcaagcatatttttgcagtttagggaattaaaggtaaaagtttattagggttcttttctccctgtaggaaaaggaatgaccatcaaaaatgatgctgtgggtctctgctgagggagtggttgagatcagggagggaggagaaggctaaggtgccctctagcctcccacccctcagtgctcctgttctcacttgccagcaccccaggaaggacacttgcgttggaaaggaatgcaagtccacggtctcttgcctgcagttccaaaatccaggggtttcaacactcattttgtggcaagctctgccctgcactcacatggggctgttgagcaagtgtcattattcatccctttacccactgcatgcattccttgggtgagcatttatttccccccacctgtgtgctagggaatgggggaaaggagccaatgacagtcattagtggaagcttgtgaaaaccacagcgcacctgcccgtttacctgttactcagtattctgggtatgtgttaactcagagtgtgtcactctttacggcaccctgttaggttagctctccaaggcctagggaggcacaggtcttataagtttttctttgtaaacttgaaagacacatacccagtacaggattttttgtttgtttgtttgtttgtttgtttgtttaagatggaatcttgctctgtcgcccaggctggattgcagtggtgtgatcttggctcactgcaacctctgctacccaggttcaagcaattatcctgcctcgcctcccgagtggctgggattacaggcacgcaccaccatgcctggctaatttttgtaattttagtagagacggggtttcaccaggttggctagggtggtctcaaactcctgaccgcaagtgatctgccctccttggccttccaaagtgctgggattacaggcgtgagccactgtacccagtgcagtgcaggattttgaaatgttaagtgtccaggaacaacctgtccctctggtctgggagtgacaggctacttttcttagagagctctcagctcttacatgttgatgctagctggctcctaatgtgtcctgtgggccctgctaggaatgcagctctttctgtactagaacttaaaaatatacgacaaggtgtgaaaacaagtaccgaataaccaacgtggggagcatctgcagatggtgactcaaagaaatggattatcaacactgactttgagaagggcggcggctgccatttggctcatacctgatcgcctgggagaacgagggtgtgctggttacaacagagctcctgcttgggtggcccatcagctctgcacctttaaaatggaaacaaggaaggaatcttcatagattccaggctggtcaggtgagagataacctggctggtgagtgtgggggtaggtcactagattttccaccagcggcctctttccttctgccaatgtgcaaaggcacagccacctaggaccttgattttgtgttagaatggatgctttcttcccttattccatcactgaggcccggaaggcttcaggggagatgggcctggctctgagggaggaggcccatcctgcagggctgagaagacttcattttgcagttttgtgataaatcagatggcatacttttctccctcgagagcttctgttttatcgtttagagtttaaaagtgatgcctgtgtttttctcaaactcaatgatatttctttaaaatacagtaatacctgcatattatataaatctggaaaatacagaggaaaataggaaaacgaagatcacataccactattcatattttggttcttcctaggtgttttagtatttattttcctttggggcctgaagatacttgtatgtaagatttttgcaaaatcatgatctaactatacatgcagatttatatcggcttctctagatctctaagtcatcttcgtggtatgattttaatggctgtatacctttttactgttgttggctttatctatagttgtatatttccatttttttgccacttttttgtgattgtaattgtgttgtatagccatttttgtttgtaaattacgacccatatctcagattatttcataatacagtggttacctcttatctgtggtttcactttccgtagtttcatttattcacggtcaaccaggcatcaaaaataggtgagtacagtacaatgagcgattttgagagagagacctcattcacataacttttagtacagtatattgttatgattccattcgttaatgtaaatctcttactatgcctaatttataaatgacacgtcatcgtaggtatgtatgcataggacgtaacatagtctagtagatgtagggctcggtactgtctgtggtttcagggatccactgggagtcttggaacatagcccctgcagataaagagggcctgctgtatccagttttggtcctggaatgattgggtcactttatgaagccggttggtgcatatgtagactgtgtgtagcagagatgtgtccatataggctagtgctaacatggaaataactatcaaatgagagagacttcctgtttatattcggattctgaaaatgcatgctgttcatatcaacctgttgtgttggtcagagatgtttccatgtacaaagactatggcagatttggacctgtaggtgtgggctctttgataacagtagctgtttatcaaagtaagattttacagggatataggttatctagagaatcaatggagaattactcacacatctactactaatccttccctattgtgaggaaagggaagattttcattttagcctggatgtgggtcgtatgattttccttctgattatgtatttttttaaaaaacatagtgtttttatgtctaccaacatttatggctcctgattcctgagtccaagaagagttactgggatgccagcccccaggggagtgtcctgtcccctctgcccagcttccttggtccagttatccaccttgggtgtggcctttcagacccctgcccgctgggtccaggcctccttttctgtgcgtacttggcagctctccgtgcttctctaaaggggtgggttttctcctctgttcccctcagccccattggcctccccagctgtggtgggagttgggtgtgggcccctcatctggcctcatagctgttacccttcttttgggccagcacccccctacgtgagtgaactcggggcacccacatgacggtggagattgctgggtgctgggcccctctaggcctgtcgagactgaccactctctcgggcaggcttgacagaaggcctgttcactgcatggttttggaagtcagtaagccaaggaccgcacaaatgtttccatcattttctagaaaagaagaagccgacgtggggcaggccttcgcgggactggcgggagcggaggaacgctatccggctcaccagcgagcacacggtggagaccctggtggtggccgacgccgacatggtgcagtaccacggggccgaggccgcccagaggttcatcctgaccgtcatgaacatggtgagtccggagccggggtcctgatgtggggggctctgttttctccttgatgagagatctggaagcaggtgctgtgtcctcatctcctcaagtgaggaagacgctgggttggggatacgggaacatagcctggtaattctgggcattgaggagggcaagtaactgggggacatcccgatggaagagcacctgccctcggctccacactggcgtagtgttgaagtgcccagatctgctcagtgatggggccacttgttaccagaaggcttccttcccaaaagtataagacccactccaagcggcaaagtcctgtgaatcccagaccctgctccaaggagtccatagtctagcggggggaacaaattccaacctctatgggaaaaagagcttactgtgttgacttagagaggctgcctagttgagagaaccaaggaaggagtcaggatgcccacgtctgtctatgtccgatttgtcaaatggggatggatgggtggtgaggctgactcctcaaatgttagacactgaaggaccttcaagggcatcctagctttacccacccattcattttcccaggtgtttttaaggaccaagtcatttgacatggcgggaacggggagccataagggtgtggaagttgtggacagggcctggtgagggagggcgggccaggcatcttgaggagcaggggctccaccctgagaagtgggaccactgaaggggaggggagcagtgtgccgaggttgatgttaggaagaacagcccagcagctgcatgcaggatggattggaatgggaagcagtgttgtggagcattggggctggcgtgagtgtgggagaggttggagtgggaatggaggagggcctggggtaaaaggaaggagctgcaggaattggtgactggcaggatgtgggggttggagagtcaggaagaggaggcaagagaaatccaggctactacacccaggcttcaagctgggcctctgggtgggtggtggagccattgtctgagaaaaggaggagcaatgaatatggggccacagcaaagagtttccattctggacaagctgaattcaaggtgggaaatcaggacagatgtcttggtgggaaagagggacctgggcttttcagcctacagcagcagctgaagtagcggagtgagtagcactgcctggctgaaatgtgtcagtgagtagagaagctgtccaaagacagcccatggagcaccagccctgggggggatggggcaacgacctgggaggaggttgtcctgaagaaggggtgacaggtgcaggaggagcctggttaacaatgccagatggaatggcattagggagtgttgtctgtagatgcttgatgaggacaaactgaaaagtgaatgggaaatgagaagcagaaacagctacaactcagctgtagaaacagccaagttgctgatcttggctaaaggagaggagagagaagcctagtcaggtggaatctgggtcaaggggaactttgtagagggaaaggggtgcgaaggttccgagtgtgaggtttagcctcaggcctgggccagactcctgcccagccataacagaagaacctctttcagtctgctgcttatcagcaggtcaggaatttagctctggccacagtgagtgcacagtgcctggccacaaatggtcaggccgcttatggaagggagtgacgcgagaggacagggcaaggttaaacgaaatgggtgcagtggggaatgacccagggcctgagttttcagtggggacacagcagccgtgggttgtggggtagggagatgacatgcctattcccggaatctgcagggcctttgggccagctgcagccaaggtcttgaggtctagcgaaggtgcagagcctgggctggcccaggccacaggcgcctttgtttgcttggtgtgatgagcgctggagctcaggggtaagtgctggggaggaagttggctctgacatgaagcccaagggaggggctcagagtgcgggtaggatagcagagggtggtggtcctcatggctggacagggtctgcaggtgactctttgcccatgtgtggatgttatgttgctgggacctccggtgttttagaggcggattgggcggggctgtggctgggcaaggacacaaagctggatgaacccccaatgcaccgttcccactgggatctcggctctggtagttgtgtagctggggctgtggtggctgggaggcctggtggcatgtggtggcctggacaaaggagaccaggactgattctccccttgtggggatgggatcccacagcttgtttcccagaggctgaaggaggcccgagagcagggaggctcagggacattgccagggtcacacaggaagtcactggcagagctatgaccaccatgtcaagcctttctttcccctaaccagccacagggaaatcaatgttgaggaccccaatcctgggcccactgggtgtggggaaccccacggcaatcctgcttgttaggaggacaaatctctggtactttgtcttccatttcgttgaagactttccaggactggctttcgggacatgcctctctctgcaggaaactccctctatctccgccatgcccctcacccctattgtgctctgaagggaggctgcttcggcagcactcagagtagaggcctcatgtcgagccgctggacccacatgtttcctcatatgccaggctcttctgcaaggtacacttgccaaggaggcccctgggacctgggccagggatctgctttccgacgtggcctcagtgggcatgtgagggtgccatgctgctcccacccctccttcaaagtcatcaactctggaagttccgttaacttaaacattatttttttgcaagtttctttttctgggttttttttttttttttgtggtagaatgcatatgtaatacgaaattcaccgtctgaaccatttttatgtggaccagctcagtggcctaaagcacattcaccttgttaatgcaaccaccaccaccatccacctccagaactttttcactgtccacaaaatggaaacttcctgcccattaaacactatcttccccctttccctctcccccagcccctgccaacctccattctactttctatctgtgtgaatctgatgactctagatacctcatataagtggaatcatgcagtatttatccttttgtggacaaatggcttatttcagtcaccataatgtccacagagttcattcatgttgtgacatgtgtcaggatggctttcctttttaaggatgagtagtatcccattgcacgtacgtgcatcacctttttcttttccattcgtctgtcagcatatgcctgggttgtttctaccttttgctactgtgaataatgttgctatgaacgtgggtgtgcaaatctctgttcaagtccctgctttcaattcttttgggcatacacctggaaatggaattgcttaacttttgatggtgctcagctctcagaaatagttcagtgttaacttttgatgatgctcatttctgagaaatagttccgtgttcctcgtgtgcacaaacccacgtctccccggtggccggttaatgacgggctgcattgctgcagtctgcccggagcacgcctgagaggagggctggaggggcttggctctgcaccagatgttttcatctgcagattattttatctctctctctttttttaattatccagggcacaagtgcaaggaataaacattcattacaacagctaaggtagtaataaggcagagcttcgactttgatatttgctttcataatttatcatccaggcaggggtggctgtttgatcccaggcagggagtgggaagggaatggggttggtacatggagacagacactcccaccctgcacccctcatgggccgtaaagactgaagggctctgttttttgcctttgattaaacaccctgcacccctcttcagctgcttgtactaagacactggtggctcaagagcccggggctgagggcagacccggggctaacacgtgaagtttggattgagatgtttcctgaggaggcctgcctaataagggtgatcccactgtgagaagggctgggtgcgatgactctgagcccttctgtcgtctatacttggggtttccggggccttttgatccaagccagaaggcgaatggaagcagagtcgtcagcccccttgcacaggggggctcacaccgcagcagccctttcttgccgctctagccctggaccaccattaagtaaattgaaaaacaagttccgttcagagatgacaccttgtttaaacaagaccacctccaccagcacccccctttctcaatccctcaaatcctagtttaggaaatccaaagagttctttcctgcctgcggctgttttagaaaagggctttccgttagcaagtgagataacctttaagccgggaggacgggaaaggattgtggctgggctgtcattagacaagccccctggaacatagagcagaacgtgatgccagcgagcccatctgtttccctccagagcatgttttctgtggggctgtgggatgggagtggctctgtctccttaagccctccagatttggaaggaaatctgctagagttggttgccaccttcattccaacacatttctctccgagttgtgggaaatagcatgattcgtgctgatggccaggcacccactccctcccaccctcccaccaggcacccactccctcccaccctcccaccaggcacccactccctcccaccaggcacccaccccctcccaccctcccaccaggcacccacaccctcccaccctcccaccaggcacccactccctcccactctcccaccaggcacccactccctcccaccaggcacccacaccctcccaccctcccaccaggcacccactcccttccaccctcccaccaggcacccactccctcccaccctcccaccaggtacccacaccctcccaccttcccaccaggcacccactccctcccaccctcccaccaggcacccactccctcccaccctcccaccaggcacccactccctccctcctaccctcccaccaggcacccactccctccctcctaccctcccaccaggcacccactccctccctcctaccctcccaccaggcacccactccctccctcccaccctcccaccaggcacccactccctcccaccaggcacctactccctcccaccctcccacttaggtctctgtggtcagaggcctggcccgcccatgtgtgctgacctgcctgccaaggcataacccagacagtaccctgtccccagggcagactggggcctaacagtgcctcagagagctgatagcatggccaaagctgggagaatttggcatcaagcgtttgctccgggtttcatagcatctcatggttttgatgtattagattagcgtcagccactggccccaagggaagatgtgactgcttatgatgcaccagctgtcccagatggcaaagtgcttccaccttactgccttctcatacctggtggatttcgtcattcccattttacagagaaggaaatggaggcttggggacgtgacacagccagggtgcagagcctgtgagtacacagtagggcaaggactccagtccgggactgagggaccccatgtcaccttgttgaaggtgacaggcatgtctggaacccatcctttctttctgtctccaccctggactgactgccattatttctggccttgacagctgctggagcttctttgccaggcttctcacttccattttcttcccccttgaatccttgctacagaataaccagcaagatcctcttcctgcagaattggaactttgtcactaggcagcattgggctcctctgtggcttccccttgcattggatggggaaggccccccaccccctgcctttcatgtggccctccagcctgtgtggccaggacccatctgcttttccattctttttgccatcaacactgactttcactaggcagcccgaacttgacttactgtctttgtcaggaatgctctgcttacgtgccttgtggaacgagttcctctgccttttaggactctgtgcaaatgtcccctcagagggtccctctttgctgatccctctgatgaggcccaccctgttttcctcaacataaaagcctgctctttcctgggtagtcctcatctgaatttacaattccatatttatttgctttcaaaaaaccattctgctgaggtttttaatgccactgaagttaagctggtgtaaagtcagattagagtgttataactttaatcctaattaaatataatccccacagtaaccccaaagaaaataactagagaatacatacaaaagcaaatgaaaagggaattaaaagtttcactaccaaaaaaaaatatatgtatacatataaaagaaaatcaaatcagctaaacacaaaagaagtcagtaatgcaggaaatgaggaaccaaagctattacaagccatataggaaacaaataacaaaatggaaaagtaagtccctccttatcagtaattacttgaagtgtaaattaattaaacttcaatcaaagacagaaattgatggcagaatgaatttgttttttaaatcatagatccaactatatgcggtctataagagacttactgtagatcagacacagaggttgaaagtgaaaggatagaaaaagaaattccatgctaattgtaaccaaaagagagcaggagtagctatactaacatcacacaacagacactttaaatcaaaaagcttccaagaggcaaaggggatgttatatattaataaaagttccaatatataagaagatataacagttataaatatttacacatctgataacagatcatcaaaatatatgaaataaaattgatagaactgagagaaatacacagttgtacaataatagttggagatttcaatccccactctcattagtagatagaacaaccagacagaagaaaaggaaatagaagacttaacacaataagtcaactggatctagcagacatacacagaacactctacccaacaacaatggaagacttttttttcctcaagggaacatgggacattctgcaggatagaccatgtgttaggtcacaaattaagtctcaacagattgaaaaggttgatattatacaaagtaccatcactgacaacaatggggtgaagttagaaatcagtaacagaaggaaaactggaaaattcacaaatttgtagaaattaaaccacatactattaaataaccaaagagtcaaagaagaaatcacaagtgacattggaaaatacttagagataaatgaaaacaaaaacacatgtcaaaacttatgggacaaggacaaagcactgcttagggggaaatgtatagcatgtatagcggtaaacacttaaaaagaaaaatctcaaacaatctgactttacaacttaaggaactagaagaagaacaagctattttattccttctgctagctttgaatttagctttggattgctatggattaaagcagagagaaaaggacagaaaaacaatagagccaatgaaaccaagagttagttctttggaaagattaagaaaattgacaaaccttagctagatcgactgataaaaaagcctcaaattactaataacacaaatgaaaacagggacattacgacccattctacagaaataaaaaggattataagagagtactatggaccattgcatgttaacaaatggataacctagatgaagtggacaaattcctagacacacaaaatctaccaacacttaatcacaaagaaatagaaaatttgaagagtcataattagtaaggtaactgaatcagtaatcaaaaacctcctaataaagaatagccctggacattatgacttcattggtaaactataccaaacatttaaaggagagctaacactagtcctcctcaaattcttccaaaaaagctgaagaggagagaacacttcctaactcattctgtgagactggcattccctgataacaaagccaaagaaaagaaacaaaactacagtcccttataaataagaaaacaatagttcaaatattcattgacgtaaaagtcctcaataaaatactaggaaaccaaattcaatagcatattaaaatgattatacatcatgatcaagtgggctttattcctggaatgcaaggatggctcaacataggcaaatcaataaaaaaagtgatatacttgattaacaaaatgaaaagagaaaatgatcatcccaatttatacaggaaaagaatttgataaaattgagcagcctttcatgataaaagcactcaatagactaggaatagaaggaaactacctcaacattataaaggtcatatatgaaaaactcacagctaataatacactccgtggtgaaagactgaaagctttttctttaaaatctggaacaaggcaagagtgcctgcttttgctacttctgttcaacataacactggaagttctagctagagcagttaggcaagaaaaagaaattgaaggcctccaaataagaaaagaagtagtaaaatgatctctgttcacagatgacatatttattacatgtagaaaaccctaaatcttacacacacagagagagagacagagagaatgctaataaattctttgcaaagtagccacgtactaaaccaaccacaaaaatcagttgcatttctatatgctaacaataatctgaaaagaaaattaagaaaacagttctgtcttcagcagcatcaaaaagaataaaatacttaggaattaaccaaataagggatagagttttacatggaaagctgtaaaacatcaatgaaggaaattaaagaagacataaatggaaagccatcatgttcatggagtggaagacttattgttaagatatcaatgttatccaaagcagtttacagattcaatgcaatttctatcaaaatcccaatgacttttttgcagagatagagaaatccattctaaaattaatatgaaatctcaaaggacattgaataaccaaaaccatcttgaacaaaagaacacagtaagactcacacttcctcatttcaaaatttactcaaaagctgtaataatcaaaacactttactgacataaagacaaacccaaagatcagtaaaatgaagtagagctcagcaattaacacatatatatggtcaaataatttttggtaaggatgccgagaccttcaatagagaagtgacagtcttttcaagaactggtgctgggaaagctgggtatctgtatgcaaaagaacaaagttggatccttacctaacatacaaaaattaactcaaaatggatcaaagtcctaaacagaagaggtaaaactcttagaagaaaaaacggaaaagttttgtgagatttgatttggcagtgatttcttggatacaacaccaaaagcacaggcagcaaaaggaaaaatagacaaattggaattcatcaaaattaaaaactcttgtgcctcaaaggatactatcaacaaagtaaaatggcaacccacggaataggaggaaatacttgcaaatcaaatattttataatatccagaatatatagaaagcttctaaaacccaggaaggaaaaaaaaaaacaattcaatttaaaaaatgggaaaggacttaggtagacatttttacgaagaagatgtacaaatagccaataagtacatggaaagatacttggcatcaatcatcagggaaatggaaattaaaactataataaagtaccacttcacatccattcccatggctattataaaacaaaaaaataaaacaccaaaacaaaacagaagtgttgacagtgatgcggaaaaatgggaaattttgtacattattagtgggaatatatagaaaatggtatgattcctcaatgaaacagaattaccatatgatctagcaatttcacttttgagtaaacacccaaaaatgtttatcccaaagcagggacaagaacagatatttatacaccaatgttcatagcaggattattcaccataactaaatggtggaagcaacccaaagtgtccacagatggatgcgtaggtaaataaatatagcgtataggtataatggaatattattcagccttaaaaaggaaaacaattctgacacatgctgtaacatagatgagctgtgaagacattatgctacgtgaaatgagccagtcaccaaagaacaaatactgtgattccacttacgtagggtagtgaattcacagagacggaaagtcgaatagcgctggccagatggctgagagggaggagggaatgaagagttgtctaatgggtacagagtttcagctttacaagatgaagaaagttttggggataggtagtagtgttagtgtataacagtgtgaatatatttaatgtcacttaattgtaagcttaaaaatgtttaaaatggtaaaattttatgttatgcatattttaccacaatttttaaaaacatcctacatatcacctgcctttgcagtatccataagctcatcaaggtaggcctatgtctacaccatcaacattttgtcagtgcctggtacgcatgcaggagatgatccagaaatatttgtgtagtcagtgaatgcataaatgaatgactgatgccatataccagcatcctttgcgaaggattcagtgctgaagtcacagaaacaaacactggctttacttttttaattcctaggcaaatttgcttctggagagccttttgtattctaagcacatcccacggatatggtgtattaaactctgtttgaaagtgtttatgcataaatataataatacacttatacttcctacacagcccctgaggtaggctgctgaactatgggccatctcctctaggtcttgtcttttaccgagggtggtacaagatggagaagataaaacaagcatggttaaaaagaaaaactgcaccaagaaagaatgcctggcggctacaaatggcttctcatccacaccctattgaagaaatggctccagagtcacagaagaaatggctccagagccacagaagaaatggctccagagtcacagaagaaatggctccagagtcacagaagaaatggctgcagtcagagcagatccaccttggccgtttttaagagcttatgaagcctggaagaggtcccagagaaaactggcgtcatgcaaagtggtctcatttttgaacaaggaagaaaggagtcttgtaaaccctagagcaatgcatttggcccttcttgtattggttggggattttgattacaagcaacaggggctggatctgggctggctgaagtagaaaaggaatcccagttttggaggtatagagggaggcatccagaatcaaaatgaagaccgagtctccaagctcagagtttggggaaagtttggagggaacttgggaggccaggaagcaggagagatgaaggctaaggtcaggtgaggagtgagggctggtcatgcaggcttgacctctcaggctggattcctgctgccgcttctctgtcccaagaacatctcctgactgtctactgtccctcctccaggaatcagagccccgaagggaatccagggaacaggactgctctggggctgcgagggcgggcagagtgagtctctatccactgaggtttcaatggtgggaagaaggtccttgccattctctagagctcacctcctgggagcagttttcctcaatgaatacagcaatagatgctgtttggcccctaaaaaagtaaaaattaaagatcagtcaatcaatcaaaatcccagcaatgtgtctagttaccacagaggctagagtataaaagaagcttattcatatgacatatgacccaacacctctactcctgggtacataaagaaatgaactgatagtttcttttgctgtacagaagctctttagtttaatagatctcacttgtcaatttttgtttttgttacaattgcttttaggacttagtcatgaatcctttaccaaggctgctgtccagaaaggtatttccgatgttttcttttaaggtttttatagtttgaggactcgcatttaatctttaatccatcttgagttcatttttgtatatggtgaaaaataggggtccagtttcattcttctgcatatagctagctatcccagcaccatttattgagtggggagtcttttccctattgcttatttttgttaactttgtcaaagattagatggttgtaggtatgatgtggcattatttctgggttcctgtttctgttccattggtctgtgtgtcttgtttttgtataagtgctatgttttttggttactgtaaccttctagtatagtttgaagtcaggtaatgtgatacttctggctttattatttttgcttaggattgctttggctgttctgccccttttttggttctatatgaagtttagaatagttttttctaattctgtgaaaatgatgttggtagtttaataagaatacaagctacaggatgggagaaaatatttgcaaactatctgacaaaggtctaacatccagaatctataaggaatttaaacagtgcaaaagcaaccccattaaaaagtgtgcaaaaaacatgaactgacacttctcaaaagaagacatacacacggccaacaaacatgtgaaaagatgctccacatcagcaatcatcagagcaacgcaaatcaataccacaagataccatctcacaccagtgagaatggtcattattaaaaagtcagaaaaataacagatgctggcaaggtgcagagaaaaatgctcatacgctgttggtgggaaggtaaattagttcagtcactgtgcagggcagtttggagatttctcagagaactcaagacagaactaccctttgacccagcaatcccattactgagtatacacccaaaggcgtatagatcattctgccataaaaacacatgcatgcatatgttcattacagcaccgttcacaatagcaaagacatggaatcaacctagatgcccatcagtggtaaactagataaaagaaaatgtggtacatatacaccatagaatactacacagctgtaaaaaagaacaactcacgtcctttgcagcaacatggatacagctaaaggccattatcctaagtgaattaatgcgggatcagaaaaccaaatgctgcatattctcactcataagtgggagctaaacactgggtacatgtggatataaagatggcaacaataaaatagttacaaaaatggataagttacagtatttgatagcacaacagggtgactatagtcagtaattgtatattttaaaataactaaaagtgtaaatgtattgtctgtaagacaaaggataaatgcttaaggtgataggtactctgtttaccctgatgtgataattatgcattgtatgcctgtatcaaaatatttcatgtaccccataaatgtatacacctactatgaacccacaaagattagaaataaaattttttaaaaggtggcagcagacactgcggactactagagaagggagacagggaggggggcaagggctgaggaactacctctgggtactatgctcagtacctgggtgatggggtgattcgtatcccaaacttcagcatcacgcaatatactcacgtaaccaacctgcacacatacccctgaatctaaagtaaatgttgacattataaatatatattcatttagacttaccacgaaaataaaaaaagaaatgaattaaaagcagagcctggaagaggtatctgtacacccgtgttcacagcagcattactcacaatggccgaacgatggcaaaaacagccaaggtgtccattggcagatgggcagataaacaaaacgtggggtgtccatacaatggaatattatccagccttaaaaaggaaggaaattcccacacacgccacagcatggatgaactttgaggacagtatgccaagtgacacaaaaacacaagtgctaaatgactctgcttacatgaggtaactgcagtgtccaagtcatagaaacaaagtagaatgggggttgggtggggggcagtgggagttagtgtttcatgagtatagagcttcggtattggaggatgaaaagagtcctggaggttaattgtacaataacgtgaacgtaattaacactacaggtaagtacacggttgtgcactagtgggtgagatggtaaattttatgttctgtttgtttcaccagaaatacaaaaacaattgactgattctactcagattgatttactgggtacttagtgtgtgctagggacccttgcatcctctgctgggatagagtagggaccaccggaggtctcatcctccggagctcatgcagtaggaacgacagacagcattcaacatgcaaatcagtgagaaggaaaaccagagcgtggtaagtgccctgcagagaaccaggggacagcagtgacaggtatcagggccacctctctgagaggagtgaggtggccttagaggggaaggtgttaagccaacataagcaaccagccagtggtggtcaggctggcattggagaagcacagaaatagctggttgcttgtgggtgatggggagggtgatgggggcacagtgagaagcgggcaggccgaccttgcaggcggggaggccagggtgtggagagcagcctcattccaggcagtgggaagctgctgcacgggcttaagcagaagagggatgggctccagttagtgttttaaaatatgcttctgcctgcccttacctgggggaatggagttcggctcctggctctgtgtccctggcaaaccgctcacctgtgcaggtacatgtagagggcgaaggctccatcgggccaggcgcccagcagcactctggccctgcagttgtgggttttccagatgtgctgtgctggttttgtgtgtacatcatgtgattctcctttggttggggtggcggtgacacgggagcaggaatattttaaagaacaaattgcagacggaagcaggtggtgctgataccagaaaccgtgggtgtgggcagccaaattggaaaatggggcagtttaacagagctttggttgttcttagcttccttaacgaccgtggagtggaatgaaaaacctgagctgttccaggcaagttctgtttggagggaaaatgacatgaattttactcagttaccatgtggaagagacaagcctctctctggtgaccagcaagactagcatagtgctagagcactggctggttcccacactccggtgggtgtggagcagggtggggaaggagcactgttcaacacagatgacctgcccacacccagggtctctgattcagtgggggctggggtggactccagaatgtgcatttccaacaagtgcccaggtcatgttggtgctgctgctttggggaccccactcagacactgtgctacagagcatagctttctcctgtttgggggtcttaatagcagtgtatgcaacctgagagtgtcacccacaggtccctgtgtggctctggggggaggccttgggtcacacaggtaggtggtgcccttgtgaagcccagcctggcgtggtgagcagctccactccttgtgcctccaaccacggctccttctctggtacctgtctgcccctcccttgctgtgtccctacattgcctagccagagaagccgtagtgtgctgcaggcggcaggtccaccctgctaggcccctaggctgccaaggaaatgtgacaaacgcagccaggactgaacacttgctgggatgccgccagagctggacgccggagacggaatttccagacgcttggctgcgctgttccctccccaaccaggtgtctccctaaacatatagccgttgcctccaagacttctcctgagcatgagtttccatgggaaaaaaaagaagacgagactttgttacatgtctttgaggcttgtgccttgtgttttgtggctgtcgtcggattgtcacctggctcgcctggcttggcacgggacctcagttgattctgaacgtgcgccttgccctgtgctctgagccttgtcagagcctgtggtcggcacctggcaggtgacaaagtgcttgagctgtgttcaggccttggtacctgctctcttggacgtcagtgccctagttacatgtcaaggggaaatttcttcttacaaggcttgctagagaacattatttagagcatgaagctttatttttttaattcgttaactttgtacttttaattgtagtaaaatacacttaacatgaaatttaccaccttagccatttttaactgtgtggttcggtattcttaggttcgcattgctgtgcaatcaatctctacagcttttttatcttgcaaaacggaaactctgtacccattaaacaccttcccatttttgcctccccccagcccctggaacacgaaactttcccatcccccttccatctctcacctttttagtggcatttgttccaagggaggcgactgagctttgggctaatggtgtatggggtgcatgtggctctgaactgtcatcagccagccaaggagaaaatgggtgattttgacaagggagcttgttcctacagttttgttcttcctgaaacttgcactgttccttgcagtctttccttttgtggcatatcagaatatgactgaggattgctttctcgtgttacttctttaaatctgtagtattccttaatgtttctggttttgactgggcttggcgtgacaggcagtgtttagattgtgctgtgcaatctcagtgaacactgtgcaacttgaattttctccctcataacttcaagttttcattcttcctaattttcatgttttgaactgaaatttaccagtttagatccaattctgatgctgaatattttaaggaaaatttgaattacagccattggatggttctcgaactatcaaaacaggaacaagttgggtgcctcccccctcctcccccaggcttggggataggacatgaatatgtgacttcagaactggcttgtggatggtccagtattaagaaaacaacagctagttgttcctgaggaaaggagattttggaaatcgcagaagtgagaacagaacaactgaatgtgttctatttttccttgtgtgaaagaatattacgtcacacaaagataggttttttttaactgtaataatggttttcaaagagtaaaattcgagcagtgacacggctgattcctttgtcacggagatgctcaaacactgcgtgcctggcttctagcgcttgtgggctgggtgcagccgtgttgagcggctccactcggcctgagttgaccctggtgatgctgtctaccgtgcttaacgcttgctgctgatgctgatgtattgatagcgtgaacacagcacctgctggagaaagttttaatgttcctgctggaaaattctccctcctgggttatgtctataggtaaaaaccaagtagaatatttaaaagattctcattcttgttccctccaaccttccatctgccactacctttactatgctctccgcgtacctctcgcaatcctgttttctctgcgttatggcaaaggaactcggcagagtcataatgacctggggctcgtcagctgcagtgggctttttccatccatgtcaactttgactccttcgccttattccaggttttccttctcttcctcttgaatcactttgctgtgactgcttgatgttgaggtccttacaattaagttctgcaacaagacatgcaaaattgagaaagataggtccttttctgttattgcaatttatttcagtgacaaactttggttacaatgggacttgagggaataaagaaggaatgtggaccttttggctggacagggctgagtttgaatcaagccattgtgactggctgtgggtctcatgcaggtggctttacctcgatgaactggtttctgtgtttcccagctgagagtagtggagatgccagccttggtggggtgtggcaagggttagcaatgacacaggctggcgttcagcagcaggcatctgtctcccccagccccttcatgaaggtcgccttaaaccccaagcatgaaagcccagaatggaagttttcaaccttctgccccttctttttttcaaaaccacctttcgtatgcgtggttttttttaaccaactatttccagcttagctttatctatatacataagcatactgtatatgtatgtttgcacacgtgtgtatgattctagaggtttctcttatatacatttttcttttggcaaatccatttttaaggacatttttgtctttcctggacaaccttttaaataaaatctgggttatgtttctcacgtatgtattttttgttccaataagacttgatgtatggacactgacatttgaatttcacataattattctttaggttttttgtttttttttttttttagtactggaagagtacaacctatatttttaatattgatttttaaatttgttatgaatggaatttgtattttagaacaattttagatgtacagaaaagttgatcagttagtacagagagctgccatacatagtttccccatcatgagcctctcatattagaatggcatgtttcttgtaattaatgcaccaatactgatacagtgttataaactaaagtctacgctttatttctatttccttatttttacataatctcttttctgtgtcccaagttcccatctaggatactactgtatttttaaaattttttatctttatatctttatttcttttttctgtcttgataggtatacaatatgtttcagcaccagagcctggggattaaaattaacattcaagtgaccaagcttgtcctgctacgacaacgtcccgtaagtccccacaggcacctttcaagcaagcagaaaatgtggctgggctggagcttctcaactgctgttgaatgctaagcggggctccagggagttgccagtctccgtcactctctgtggctttgccagcgtgagaggaaagccggcatcagtaccggaagcatggtgtgagggggggctgttgagaatctcagggaaccctaagcagtgagcccacacacatccacctctcccggagggtctcggatggagtctctaggatagtgcaaagcttgatggcaaggtctctggcattgtggctccccttctgaaactacattagagcttcgaccccagtttgggttcatggcagcatcattttctggtctttcaatggagcgccttcccacatgctgatgttacctgccgggtcaagccaccaccatgagactgagggagcatcgcttggtttgggatactgttctgtttgcagaaaagaagatgcttttttaaaaacagcatagtcttcacttgcacctatatgtaaggcccctgatggtctctctggatctatgccacgtacccactagcatcaggcttttcttcgagggccgtgagtcatcaaatgatgtctcagtgagtgactgcctccaccttaacgtccttgtcatagtctggaaataaactctggcctcccaggcgtttgtttctctaactgtcctctgactttttttaggctaagttgtccattgggcaccatggtgagcggtccctggagagcttctgtcactggcagaacgaggagtatggaggagcgcgatacctcggcaataaccaggttcccggcgggaaggacgacccgcccctggtggatgctgccgtgtttgtgaccaggtaagatgggatttggcctgtagctgacatgtgagagggaaaagatgtttcccttcagagaggaaataggcatgttgttaagaactcaggcttggaaatcagaccttgggccacctgtctgggttttggtttcctcattagtaagtgggggttaacggtggtatccacctctgaggtaggtacgatgcctgggcatgtagctgtgtccctctttgtccctcctccattgtcacatggcattttccctgcctgtgactctgtccagacttccctcttcctataaatataacagtcatgggatttgggctcaccttactccagtgtgaccacatcttaccttgattctacctgcagtgaccctttttccacatagggtcacattcacaggtactgagggtcaggacttggacatttcttttttgggggatacaactgttgtatgtcattgatgtcgatgtggctatatcatttttttcttatgttttcaaccctctttgagaacactgatttttctttggttgctttactttaataacttaaacaaaatgtgttacatgttcataccaaaactctccctttataaaatacacagaaatattcctaaataacttaatgcattagattaaaaataccagctttttattagagttgctaagaatatgtcaactttgaattttaatgactttttttaatttaaagaaactacttcccaaattgcgtgcttgcttttccaactctgtgaatttggaagtaaagttgtggaagggagaactttatcgtatctttagcttggggacagtttgtttctccacaaaaaggttttttgttttgttttgttttttgttttttggtttttttttttttgagatggagtctcctctgttgcccaggctcaagtgcagtatgacgcaatcctggctcactgcaacctctgcgtcctgggttcaagtgattctcctgcctcagcctcctgagtagctgggattacaggcgtgtgccaccacacctggctaatttttgtatttttagtagagatggggtttcaccacattggccaggctggtctggaacccctgacctcaggtaatctgcccgccttggcctcccaaaatgctaggattacaggtgtgagccaccacgcctggccatccacaaagagttaaatctcacttaacatttggttttgagtcaagaaaggcttttggttgcatttctcaggccatgtgctgcaaactctgagccccatgacgtctcagtcatctggggaagttctgtgaccccagccccagacaccggacagtgcagctttcgttcctttcaaaaatcccagaataagccgggagcgatggctcatgcctgtaatcccagcactttgggaggctgaggcgggcggatcacctgaggtcaggagttcgagaccagcttggccaacattatgaaaccccgtctctactaaaaatagaaaaattagctgggcgtggtggtgcacacttgtaatcccagctacttgggaggctgaggcaggagaattgcttgaaccggggaggcagaggttacagtgaactgagatcatgccattgcactccagcctgggtgacaagagtgaaactctgtctcaaaagaaaaacaaaaaccaaaatcctagaatagacacaatgccaccacccattgccaaatggatgcctgctcactcttgtggatggttcgtcgattgccagccctgagtatgctttgttacacatttcacagtgtgctttgtagcgtgccaatcccttaggagaacacttgctgcttctacaggatatgattaaatatataatccatatataagctctatcatagacaatcagttattgaagagacattttagaaaaagtctgtctaataattctgatcgtctatgacatggctgatgtagtagcaggcaccagggaccaagggatgaacatgacctggcccatgcttttgacctggacttgcccactccagtgagcactgggagccttcaggcaccgccctccccaagagcagtggctgcccacactcactggccagaggccgctgttgctcaaggcactttgcaatggcatttggcgactgtgaggctttctgtagaataccctgggtgccgcagcattcaggttaagggtaccatgatttgagagtggattcgatttagggagcaagcaagagtccttgggaaccgtgtctgtgcatgatcataagtaaatggagctgattttccaaatggtaattatatttggtctgaaagactttcctagagaggaactctaaacaacgtcatctgtggaatatgcagctaaactcccaaggtttctactttgagaagagttttcataaatactgtggaaaatctatagtttctggtgttttgctaagaaataattaatggcttatggtaattttccctacattggaaaaagttttctctctttcctgctgtttcattgagtggagaaagcacttgtaagtggtctgcatttggggatgaatggcattttttttccagaggcaataaatgtcaccaagatgactgttgacaggacgtctgtattagcccttttacaaggagacatcagcagtcatgacgcaccctcaatgcaaagatgctatgagttagactttcttttcatttttcaccctcctaacttaccacaaaggaaatattttctgtaaaaatcttcttttctatacctcaaactttttacaatggctactgtaaaacaaaatgatacggttttgctgtgtccccacccaaatctcatcttgaattcccacatgttgtgggagggaccaatagaatcgtgggggcaggtctttcttgtgctgttctcgggatcgtgaagaagtctcacaagatctgattatataagggggtgtttccctgcacaagctctcttcccctgcctgctgccatgtgagacgtgcctttcgccttccaccatgattgtgaggcctccccagccatgtggaactataagtgcattaaacctctttcttctgtaaatttcccagtcttgagtatgtctttatcagtggtgtgaaaatggactaatacgcaaaacaatggaaaataacaagtgttggaagactgtggagaaatttgaactcttctgtgcaccatcgatgggaatgtaaaatggtacagccacaatagaaaaccagatgatggtacctcaaaaactcaaaactagagttaccacgtgatcccacttctgaacccagaagaactgaaattcaagataattgaaagcagagactctgatatttgaacactcatgttcacagcaacattattcatgacagccaagaggtgggagtgacctatatgtccattgatggatgaatgggtaaacagatatgctgtatatgtacaagggaatattactcagccttaaaaaggaaggagattgtgacacgcgctacaacatggatgaacctcaaggacaaatactgcgtgattccacttatgtgaggtacctacagtagtcagattcgtagagataaagaatggtggttgtcagaggctggggagaagggagaatggggagttgttatttcatgggtacagagtttcggtgtggggtgatggaaaggttttggaggtggatagcggtgatggttgcatgacagtgaatttagttaacattactgagctttacactcaatggttaagatagtaaattttatgttcatgtattagcacaataaaaaaattagtagtaaaaatgttctgttttaactaaacacataggagagggatcctaattgcatgggagtggttctggatgaggatgctgggggcatgggcaatgtcctcatccaggtacagagaaaacaaggttttgtcagccacaggctgctgggctctggatgaaggatgcatttggcgtcttgcatagctattagctgttgccagcccgggagcctgagctttcttctgcattttgggctgacgccttgaagctacatgagcaatcacagtccctctcacctgctgctgtggagctgctggactgaacagatcagtgcacgtcccgtcttctgggtcctcgcagatgttaaattgaagatctccttgaaggacgggggaggccgcagtggagtcgggcaggaagctgagttggccaggaagccttgtataataactagaggtagagagctgcaattccctaggttgggataataatgggctgatgttttcacagggagattgggtgagaggcagcttctgccctggagaaactgtcctttcctcccaccgtaacccgagctgaggctgcacgggcctggctgcgctcaggggccagcttccaggtcctgagctaggacgggccaacgtgagaatttcctcccgtttaaggttcttttttcaccttccaggctgtggtcaagccggacagtgtattctccaagacgttccctgacaaacaggtggctaggtggctgccatggaggacgtgagcatgacatgtctagcaggagctgctgagccagaagcggttgaagctgggttttctgcagctgtgtctgggacttggaaggacccctgagtggactgggcctggggtcacacggagcccacacagaagccagggcttagggggcttcagcacctgggggggcttcaccttggcctccacatctgacccagaaagctgagaacgcagagaactcctccctgaagtcgagaactcctcctcgagcctgggcctgtgctctgggtgagagtgcctgggagacaccatagcagacacagctggcccgaagctgcaccaccaggatccctctggccagaccttcccctccagcataataccatctaactcctcggggcacccttccctttaccttctgccaggggaccctcttgccaggctttgcgcgtggtgaagcctcagcaagtatccatggaacttgatgttacgctcccaggcttcccacgctcgtgaggccatggctgctgggtagcttgcagggccccttgaaagggtctggaaacgtcagtcaattaataaacgaatgtattaagtcccaactgtatgcctggctgtgagttacgcacaggatcagctgtgtaacttgtggtgccccatgcaaaatgaaaatatggaccccgcgacagcagagtgttagcccagggcatgggtcagacacccacaaagccagccctgtcatgcagatccaagtcagcctcgaggaacgcaccttggggtttcaatggatgtaggcgctgggagccaagtctagccctcttttcattcctgaagtgaaccctacagtccctgcctgggggtttgtcatgagttggcagtgggatgacctaaaaagtgagtgcccctgataatgaatggaacagagccaggttccctggagataaagcagcccctgcaggcaggtggcttgctgcttctcttctgagaaaggaccttgaacaggaaggatcgagattcagattcggctgaccttttcaagacaggcctctaactgagtgtggctctccctccctgagctgaacacacctcttcctccagtgaagcagtgggtggtacctcggggtctgtcatttgagactgactgtttcccctcagggcagccattggatgggagaacgcagggaggtggagtcctcctcagccaacagggctggctctctgcaaaatggcgcctgccttggcctgcggcttcacttctcttctgtcagactgaggccttggtccctttctccctttgcccagcttagatgatggggcaaagctttaaatatgtcctgttcacaactctgagaaaccctggagcaaggtcctgggccagctgtgtgtgtgtgtgtgtgtgtgtgttgctcaaaacacgagaattgggaagggtgctgaatgttgggctggggctaggtaggtatggggccagtgagcacacccatggctctaattttatttgctttcccctctgccagtgctgcttctatcgcctattgcttcatcttctaaaagggagtctgatggaaaaatcaagtctctaggccttttcatctctttatgatattccttctccatttccctgaaggttaccttggttttggagtgaggttatgaaaagtgtggatctcaagcgttctttgggccctgagagaagatgggtgtggggcctgggaggggccgtgtctgggccaggttgtggctcctcagccggctgagtcctgccccagccaaccctctgtggttgatccctgaccatggaaacttataaagaagcataggaatgatccagtattagaaaagaagagcctagacccctggtttccccacagcaggccagatgaaccccttgtacttgcagaaccagggctggaccaggtttcaagcatctttgctgtctcactggtccacagataccacccacccaggggatcctggggagctttaaggaagacagtttttttttttccttcaccttttaagttctggggcacatgtgcaggatgtgcaggttcattacataggtaaacatgtgccatggtggtttgtagcacagatcaacccgtcacctaggtattaagcccagcatccgttagctattcttcctcatgctgtccctctccttcaccccgcctcccccggctggccctggtgtgtgttgttccccaccatgtgtccatgtgttctcatcattcagctcccacttacaagtgaggacatgtggtgtttgcttttctgtttctgcattagttttctgaggataataggctccagctccatccatgtccctgcaaagaacatgatctcattcctttttatggctgcatagtagaggaatacagtttttagaaatgactttttgttgtcttcttgtgaaagcaatacatggtcattacagcatcaaaaaccagttgctgcccaaatagagtagcttggggaagtagagtagcttggggaggccactgcagttggatgctattgtctgagaattgtctcggatcagtgacttggcaaacatcttccaaaacattttcagctgctgaaaggagtccttccagcaactgttacgtatagaatagttcatctgtaaaagaaggttctcatgtggggtaagtggacctaccccgggaaatgtggatggattactgttgccaaacgctgctgtttgttatcattcgctgtggcctgtgtccactggaaaaataacattgcaggatgactacttgaggttaattcacagtgttttcttctcccattcttggggatactgcatatacctgatgatggcttttttattttttaggacagatttctgtgtacacaaggatgaaccgtgtgacactgttggtaagtttagagttgaaataataatctaaggggctgatacaccctgggagaatctggagacttcctggtcacagtggaggagctgtcctcaaacaagcactgcacattctgttgccttccttcctgtaagttggtctttgactttcctttttttattttcctgaaatgatttgaagttattgatggcagaaggcatctagatgaagggtcattaaggaagctatgaagagtgacaccaaggggaaaagccaccaggccgttccaaggggtctgcagttgggggtgcatttggctctgagcattttggtcacccaggcaggagaggcagcctgctaagttacacagttgtggtcatgagatgaaagcttagcagtttgttctcatgcatgcacatgacctttattgagctttaccctaaggggtgaagtgtgactgtagattataagacatgcaatctcttccacctgccttggtgccaggctacttgctttttagtgactaaagacagcactgaaagtggcatgcagtgctgagaaaacaccctttccttcttcaccgtcccctcctcctctccctttccctccctcatcttcccttcccctcccttatcttcccctcccccctctaccttcccctccccctctacgttcccctccccctctaccttcccctccccctctaccttcccctccccctctaccttcccctccccctctaccttcccctccccctctaccttcccctccccctctaccttcccctccccctctaccttcccctccctcaccttccccttcacctgccattttcctttctctcccgtcctcagttatgtctggtttgctcttgagttctcatggatttcaaatggaaaccattctttgcacacagtgtttggttaatacaggcacaatgccaagggtgtttccagttttccctgccataacgcgaacctttgttcatcgggaggctgaaatatagtattgcattgccagaatcaaaattgtgaatcgtgtatgtttagaattgtagtaaaatcgaagaaaacagtataggtgtgaaaaatatatactgttatgaaattcacatgttgaaaacctgagcttctgggggagccccagcagtgagtagccctaagcctttgttctggctctgccacgtgccagctgggtggccttggatgtgtctccactctggtttcttaatccatcaaatgatcactttgggttaggtgactcacaagacccttcaaaatctaatataatgatagctaccattcatgtcacattttagagtttacaaaatgatttttaatatattacacttcatcggtcctctaaccagatctgagagcgagatgtcaagaagcaaccagccaactcctcctgctttgttatttgggggctgtctccatgagggaattgctagacaaaggccgtgtgaaggatgcttccctggagtgctggctgacccaggcccaggtcaggttggggccatggatacttgtaccggctgacctctgtctgtcaacagggctgccaggcatgtgctgtttctaggagtggctgctctttcctggggttcacgggtcaggcttggccacagtacccatgtccggggcgcctctgctccgtgctcctcctgcttcctggcttgccccgtggagacataatctctcaatcgtgtggcgcttgcctgtacttctcccctggcagcccctgagcaaaacagagcccagctctggcctccaggctgtgtgtccttcagcacctggcactggattgagaggtttggtcactcctgttggttggttgattaaatgaagaactgaatgaatgaatgaatgaatgaatgcaggtgaagggactccaatgccagtgttcattaaaacaatgtatccagtggtgtggttttcttccataggatttatggctagctttccgtttcttttgaatatataaaagctttctcttttgatgggaatatgccattaattgtgattatatcctgtgttcaggcccctggtgaagagcaggcagctacttcgaatcaagcatcatctcatttcctaagccacatcatcatactactttttattggtttgctcgggcgccataacaaaatgccacacaaactgagtggctttaacaacagaaatgtgttgtctcacagatccggaggctggaagtcctagatccaggtgtcggcagactttgcctctcctgagggcctctcctcttggccgtagctggctgccttctcctgtgtcctcttgtggcctttcctctgtgtgcgcacctgcctgttctctctcctccttataaaggacgccagtcatactggcctagagcccctactctgtgacctcacataaccttaattagctttttttgttgttgaggtagagtctcgctctgtcgcccaggctggagtgcagtggcacgatctgggctcactgcaacctctgcctcccgggttctggctcccgggttctgccattctcctgcctcagcctcctgagtagctgggactacaggtgcctgccaccaagcctggctaattttttgtatttttagtagagatgggttttcaccatgttagccaggatggtctcgatctgctgatctcatgatccatccgcctcggcctcccagagtgctgggattacaggcatgagccactgcgcccggccaaccttaattagctttttgaaggtcctctctctacctatagtcacattgggagttagggtttctacataagaattttgtggggacacaagtcaatccatagcaccgctcatttgatactttgtcacatgttactagggagcatcttatgtcctcatatcccctcccaggtgcatgcgtctcacttccttaacaagaaagtcttttaatggtcgggactgggtggagtcactgttcttcacgtgacagctggttagctgagggcagaaccagcctatctcctgatccccagtacgtgttctttctaatacctcagtgattttcagcttctccaagggagctgatgcctttttttcttttttaaaaaaattaaacgtatatggtgttttattagtatatgtttctcttaacgtgtcatattttgcttgtacaaatgattaagccagtcagaacaatgggatgattcgatgaacagaaaaatataaaaactggggttatggcagtcgtatattgatctcagcatccaatttatttatggactttaaaatatttttattttgagtaattatacagtcatgatcattgccaaaagagtacagagaggtctgttgtacctatcacccagctttgtccagtggtaacatctgacataactgcagtaccctctcagaaccaggaaatggacggacccgatagagtgaactagactacagctcttaatcaggcttcactggtttctgcatgcactcatttgttggtatgcttttgtataaagttctgtgacatcttattacatgggcagctttgtccatccaccatgacaatcaggaacagaagtccacggcggctgagatgccccctcggactgcctcttgagagccactccctgccaccctccccttccctaaccactggcacccatttatctgtattccatctttatgattttctcatcccaatatcagtttatttttcaaattttgttttgattgcgcagaatggaaaaataatctgagtcatgtagatgcatgcttgccaatgctaagagattttgaacagctgccttgaaacctcaggatccagctcgagcgtgagatgctgtgtcttgagttctgtaggaaaggagctgtctggtacctcgagataactaggaaagctttgggttgccagtgttgtgtaatttggtatataacagcgtttttttgttgttgttttaattagggtgcagctcacatatatgtaaagagggcaaaacttgatggatttttaatttatgcttatactcatcttttttggctcaatctggtatttattgaaatcattttaaagcaatatcttgagttctgttttaaatcgtgcttttttatactgtggtaaaatacacataacatttgccaccagaagcatttttaagtgtgcaattcagtggcatccagtacttccacacagctgtgcagtcccatccctctactcttgaaaccataactcagattgaggtgaagaaggcgatcagccctccagttccttatggcctaacccccaccctcagtagtccccccagggtaacctgttattgttaagtgttttaatgagtgtttttaaaatagtttaaaatagatttcagatctcagtttgaatgaagcattggaataaactctgaggcgctgcgaggtttggggcttccgtaaaaatactctcctctgcatcagcccatttgtctccactgcccagtctgcatttctgattgtgaggaatgagccaagggcacctactggaagggggctgccgccaggctgggagactggcttggaacacaggcagcacctgggggagctctggaagtggggaggccactgacatcacatagaagttagtggcaaggcctgtctggtccatgtgccaccacggctggggagtgacctccatctccccccaacagcccagggtcctgtggtctgcccctccccaccccacctgcactggagtgagggagattctggcctttgggcttccataggagaggcaacagcacctcccacgaagaatgcatgttgagggtaaagcttcccaaaggggatcactgtgcttcagccaggcgggaggatgaatgccagacagcccaagatgaccaatgcccactgcacccttcagatctttcgggtgaagattgaaacacaaggcttgcatctctaggcttcacaggggtgctagtggtgtaggcaaagttggcgtttccaaggccctgattctcctgagccctgcagtgcagaggcctcaccacactcctctgtactgggtggatttgagtgagcagatgaatgggcatgctttcaaaaagtcacaccaggtccaggcgtggtggctgacgcctgtaatcccatcactttgggaggccgaggtgggcggatcacgtgaggtcaagaatttgagaccagcctgatcaacatggtgaaactctgtctctactaaaaatacaaaaattagccaggcgtggtggcgggcacctgtaatgccagctactcaggaggctgcgacaggacaatcattagaacctgggaagtggaggttgcagtgagccgagatcgcaccactgcactccagcctgggcaacagagtgagactgtctcaaaaaaaaaaaaaaaattaacaccagaaggacccttcctccttccctcctggcaccgatatggacttcttaggcttcgctggaatgggaaggatagcaaggatgacccccttgggaattctgatctccacgttggaggaagtcactgtaaggcaggaggatctggaacaagccaccatcccctcactgagtggcccccactctgcacatgtcagacctctttgtggggtgtgcacatttcctctgttgaattcttcatccagagctgtctgctttccagccactgttgtgacataggtgctgtcctgggtgagaagagggaggtgacaagatggggacttggcagaggtgaggtcgtgcctgccctttgcgttcctcttccagatgcataccctctgggcctctctctggcagtggctgaagacagcagccgcttctctccaagcctggctggctaggcaggtgtctgagtgttgctcagtggatgtggagcattggttttctcctacccgtgcctccaaattgagctacggtggtttttgtgccagcctaaatcaagctagtcttctttttgccctttgcttggtctcctactattttttaattaatggaagggcctcccttttcgttgtccagtgagggagaggggtgatcctacaggaggaagtggagatgttccaccgttgcaggctgaaggccgggttgatgctgtggaggagcttggagtctggtctgtgcgctggggcccagcggctgtggcttgagggtcccatggctttccctgaacttggggagaaggaccccctccttgcgtcacccctggcactgataccacagtctctgataggtttgggtggcctgaggggagcttggtagacgtgcccactgcccttccggtgtgaggaagagcgtgtgggtggaggaagtgcgggtgggggatattgctggccaggacggtggtgtttgggaacaaagcatcggttttggaaatctgtgtcaggccagcccaccatgaggccatgaaaccaagaggagctggggaactggcaagaggtgagggggagtgggtgtgggtaatggacggtgttgtgtgctggacctgttgagtttttattaattgaatgtgtcaaagaggaagagaagctgtgaaccctgtgatgtcatcagttaggtaagaaagaaatgccactttttatgcataaacacaaacatatgaaaacgggcccgtctgactgtgcttcgtcccttccacattggtcaccctgtgactcttcacttatcccagccctggcgtcctcactggttggtgtgtagagccctctggggaatttccgtcacaagtgagccagcgttttctgtgttacagtggtgttggtatgtcttcattctgtgagggtggttttgggttgtcaaaaagcggtgtcaaaagtgttctttgctgggtgaggctggcaagtcgtgtttgagatacaaagatacaaatcaagttttactggctagaccagctcttgggtttctttgcttcttggggctctcctatctgtttgttccactgtattgttattccttgtaagctgacagaaggcaaatttcaactgtgcttccagactgtgtgttagaagtatagtcttcaggccaggtgtggtggttcatgccagtaatctcagcactttgggaggccgaggtgggtggatcacttgaggtcaggagttcgagactagcccggccaacatggcaaaaccctgtccctacaaaaaaaatacaaaaaattatccgggtgtggtggtgggtgtctgtaatcccagctactcggaaggctgaggcaggagaatcgcttgaacctgggagatggaggttgcagtgagccgagattgtgccattgcactccagcctgggcgacagagagagacattgtctcaaaaaataaataaataaataaataaataaataaaaataaaagggcaaaccacttgaacagatactttacatatacatggatggcaaataaacttatgaaaaaataatatcactagcctgtagcaaaatgcaaaattaaagctatgatgaaatatggctatggaatggataaaatacaataaaaaaaaagtgtagtctccagacattgcctacgagggcaaatgactccttcaaatgagtaagttctgaagtggctttgtccttacctaggacccatctcacttttgggccctgttctgggcttatccacactatgtcgttggtgtctactctgagaaggttacaaaggggaaggcttaattacatattcgttgttccaaattagacaacttgcagtctttagcaaattcatctgtttgtcggaggctaccttggtatttataattatgcttttgaccatgttctttgctttttgagaggttttatgaaaggtttcaattttgggaatcaagtatgcttacatctagccatcaagagtgaagaaatttttggcaaggttcattttcatcatagtattaaaaaatagaccatctgcttaaaagacttaggaaagtcgcatgctattcattttagggcttcgtatcccacaaattcagcttggatttctcggctgattgagttgcctggaaaacaaaaaagtggaggctttaggaaactagttccctttctcacaggtttagctttaagcatccgtagagtatttcctccggaatgccaattaggttgtgtctgatcgttggagagcgtctgcgaaagactgtgtgtaggagctgttatgcctaagagaacagaagaggacgaggactggcgatcccgagaacattcctgccttgacctctgtgtgcttgctctgtgcaccacttagagatagtgactggggtgaataaacatgtaagtgatgcatgtgtcttacctacacacaaataccagacacatatgtacacacgtacacacacacctttacgctcatgcatgcctggggtgcatgcacacccatggaagtgtgcagtgtgtgtgcttcccataccttaaggcctggcgaggctccatctatgcctacaaaatctgtaagttctctaccagcgcttgttagatccttccaagaagatctgtctgccctgggaacaacaaaataagatcccactgcaggaggtttgtgtttgagacttggctggaagtccacactgaaaccagttgccccaggggaccaagttcaacttttcttgttcttcctgccagggttgtgtctaaggttacataatggctgaaatacattagaaaatggtgaaaatatgtaggtatgtttttgcatgggatgggcttctaccagccctttggagatgtagaaccaacatttactttggaactagacagagaccaacaaaacacagggctgtgcatgaatgccttttgggctggaaagcaagagggctgagcaagcaaagcagctccccttgcagggtttccagccgtgacctttcaaatgcaggcccagagcccccttcattgttctgactgggaaagtaagtgtcctgtaagagtgtccttccttgaggtggctggtgagtattttcccaggcccctgcctgcgaggggattctgaaacagacctcccttccaggttggcagctgcaaacctgcacaagatattggtgacactggtgtcagtccaaagcccactgccctgtcattcttccacagcttcagtgtgacaagagtagaaggagtgtctcttgttctctcggtgtttctgttcctcatggccaaggaacgcctcatggcaagcttggaatgcagttgcatgctccattgccttacagtgcggctcttactctagtcatgcaattcggagtcagcctgaccctttattgggtttgttagaaacaaaccaacaaagccctccccgaaaacacgagggggagtagaatcataaatggaaactaggccttgaagtgatgcttcctctgtcactgtgagtcctgaggagctcttagaccctgtgtgctgcctgttcataaacagcctgcactcggcggtgcaggagaggcaaggagagcaggtaccatctgtagccagtgccattgaaacaagggtcctgctccggttggaacaagccgaggaaatcgcaggctgagagccagggaagggctccctgtacagtggccctcaaggtcctgtttaccacctgcaggggcccttcctctccatgatgaaggctgagcccatcaccaggtgccacccatgagaagcggggacaggcatgactcttctttatgaaaccatccgatctcatgagacttattcgctatcaccagaacagcacaggaaagaactgcccccataattcatttacctcccaccaggtccctcccatgacacgtgataattattggagctagatgagatttgggtggggacacagccaaactgtatcagtaagtcactcaaggacagtggtggacaagattggctctgcagttaaacctgcattcgaatcttgcttgtccaccactgtcgttgagtgacttactgatacggtttggctgtgtccccacccaaatctcatctagctccaataattcccacgtgtcatgggagggacctggtgggaggtaattgaattatgggggcaggtctttcctgtgctgttctggtgatagggaataagtctcatgagatctgatagtttcataaagaggagttcccctgcagaagctctctctggcctgccaccatgtaagatgtgacttttctcccctttgccttccgccatgactgtgaggcctcctcagccatgtggaactgtgagtccattaaacctcttttcctttatacccagactctggtatgtctttattagcagtgtgagaatagactgatacacttacctaatatcccctgctctgttttctcatctggaaaatggggataatagtatctagggttgttgtgagggttaaagcggatgactaatcacactcattaggatgaccactttcattttgttttgtttcatttcatttctttttcttttctttcttttttttttttttaagatggagtcttgctctgtcacccaggctggagtgcagtggcaggatctccgctcactacaacctctgcctcccgggttccagcagttctcctgcctcagcctcccacgtagctgggattacaggcatgcgccattacgcctggctaatttttgtatttttagtagagatagtgtttgaccgtgttggccacactggtctggaactcctgacctcaggtgatccaccctccttggcctcccaaagtattaggattactggcgtgagccatggcacccagccagaatgaccactttcaaaaccagaaataacaaatgttggcgaggatgtagagagatgggaacccttgtgcactgctggtgagaatgcaaaatggtgcatctgctatggaaaacagtatggtagtttctcaaaaaattaaaaaatatgattcaggaactctacttcttgatacactcccaaaagaattgaaagcagggactcagatatttgtacatccatcttcatagcagcactatttacaatagccaggatatggaaacatcccaggtgttgatagaggggtgagtggataaacaaaaatgtggtctatccacacagtggagtattactcagccttcaaaaggaaggagatagtgacacatgctataatatggatgaaccttgaggacattatgccgaatgaaataagccagtcacaaaaggatgaatagtgaatgaagccactcacttgaggcacctaaagtggtcagattcatggagacagaaagcaggatggcagttgccaggagctgaggaacgcggtcatggggaatttgtgtttaatgggcagagttttttagttgaggaagatgaaaagttctgtaggtggacggtggtgatggttgtacaacagtgtgaaggtacttaatgccacggaaccgtacacttaaaataggtaaaatggtacattttatgttatgtatactttacataatttttttaaagaagtaagatgacagagggagcagtgttgtgaattttattttctagcacttctttgagattttgtccaagaaaaatgatcaggatgggagaaggacaatgcccagcaaaggagctcctcctgccttctcccctgggaggtgagggaggagtgatgagacacaaatagtgcagggtttgagggtggtgtgtgcaggacggggaggagaggtaccgcctaggatgggagaggctgcagtgtgtgggagaggatggagagaggagggggcatgttaagaagtgtcaccagggagtgaattagagccctttgaaatgttcttaaggacatgccagtagagattagggtgcctttgcaagtttcttttttggttgctaggctatgcatctttggcttaaactccagggccagattggaccatgtgggcactgagacttactcaagttaccactgatgtttttggacaacggacagtcctcatttgcatctggcattaaaatcaccgctttagagttgagccaagagttcgttttcccagtgactgctcggccgctggactcacggtgtaaagagcaaggtcagtcatgccgaagccattgcagcacttggaattaaccacaagggcaggatgcgagtgaccctccggagtcagaactgcaatttgagggagaatgtttgtttgtagcttgcgtgtttcaggcagtcccccaggctcctgtgctctttgtgagttcgttaatttgaagaaccttaaaccctcccttgtgaaatctcaggttggctctgagtttttaacctcaatttctacagatatgcagcgtaagtgcttcaggaacgggaaggaaggttatgtcagggcgatcttttgggctgctctaccagagaccgaatctgggcctggctactatttaggacttcagtttaagcaaccttcggagttactagcatagacgacttggattagaaattcctgacaagtgctgttgtgctgagagggagcttgattgacatatagaaaagggctgagtcatggttagacaagaactgaatcatggttaggaaaggctgagtcatggttaggtgagctgagtcaaggttaggaaagggctgagggccaagtgactgccctctgcctggtggaatggggtggaagtgatacgagctatttctaggcctggcccagcatccatgaatggcacctaggggctctttctccgttggccgactggctgaggttgtccacagaactggcagccatggcccctgaaacattggatgttacatgagtgagaagtaaagtgtgttgagacactgagatttgaggctttgtttgctaaagaaattaccgcaacaatcagaagtgctagtgtgtgtttctacaagatcctgcccttgaaatacttcgaggtctcaaagcgttgaagacttccatccctgtggggactaagaggacagtggccctatctctacgttcaggcttacagaacaactttggcaggtgacctgccagggtgtggtggaatgaggggtagagccagaatcttgagtgatttttactgaagaattaaaaagtagtcttggagttgtaggggaagaaaatttaactttttactccacccatattagattcattggccaggaccctgaaaataagactgacagcaacaccaaaaaaagccagataggccaggtgtaggggctcacttctgtaatcccagcactttgggagaccaatgtggatggatcacaaggtcaggagttcgagaccagcctgaccaacatggtgaaacaccatctctactaaaaatacaaaaaataggtgggcttggtggcgggcacctgtaatcccagctactcaggaggttgaggcaggagaatcgcttgaacccgggaggcggaggttgcagtgagctgagatcctgtcactgcactccagcttgggcaacagagcgagactctgtctcaaaaaagaaaagccagattaacaagagaaaaacaaacagaagttgagtataagctgggagctctcagcaatgaggaacacagaggggtgattagaacttggccttataccgcgtcttgacaaagaataatacattcttagaagtgacaagatgaaagaaaaggactgagttctgggtggcagattgtgggaaggtcagctgtgggggaactgctggaagatgaaggctcattacttgagtttgtcatgtagattcctcgggtgccctctggactgatgagggtctggggttctctccagtgattaacttctgttcttcctggtagaggagtgaggggggagcacctttacaaattcatgtcttgctctttggcagagagtgggaggacaaagctttcttgtacctgcttcttctccattgctttcagctcaaaataatccttcggccacagtggcatatgttgctaccctccagcctttgctatggtcttggaacacattcctgacgttgctgaaggcatctggggctgaggaggaagaagcagcagagagattgctgctccttgagaacaggagtcacttaggcctggggattggaaaggtgcctgcagctctggtctctggtggcagtctgggtgctgaccagcagcttcccagtctccattaagggcccagagctagccttaggcttgaggtggggcccagggcccctcctgagcagcagctggttacaggaatgagtacagtgatgattggatccccccatgctgatcccggtacacgtggagcaggctcactgatctgccgcacagcctggattgttggggttgggcacattctggctttgctgtgactgggggagagacagacatctggtagcaggacatcaggtaaaggttttcacctggagaccacctcctccttcactggctgagggtggagggtgatcctgaaggtggggcgtggcgcacatctttccccagagggctcaccatccctccactccaggggttgtaaggccctgatggaattcccacctgacttcttcgtcaaatcaactgcataggagtggcatgtgtccatgtccaccttcctcctggccacaccatgtcccttctctctgaagtgccctggactgtgctccagtagcaccaggcagctaggggagcctggtggctcattagacgtcaaagcatggcaggaggcagcctctgtggctccagagcccgtctccaacacttcctcctgcaacgctggagagagacccccttctcattgcttccacaaagggtagcctcttcttgctgctgccccgctcaggggcatccacacagtccagcatctcacaggcctgggagcggtgccgagatctgcaccttcttttcccttagccttggagagctgaagagcgttgctttcagcagggtcgactgcggtatccctgcaccagtcattattgacaggtaggaaagaccacaaccagcgccgctcctcatcccgtgcttgcaggagtgatgaaagtgagactgagaacagctaccatctgctgagaacgtcatggtcttgggtcatttaatctgcacaacagtgtgcgggagctgctgctgttctctccattctgcatgtgggaaaaccgaggtgcagagagggagatgtcttgcccgaaggcacacagcttgtaagcagccaagctaggctctgaccccaggcggttgggttacagtctttcctttctcacatttcgttttcttttttgagacggagtctcgctctgttgcccaggctggagtgcagtggcgtgatctcggctcactgcaagctccatctcctggttcaagtgattctcccatctcagtctcccgagtacctggggttacaggcacacgccactacgcctggctaacttttgtatttttagtagaaacagggtttcacctgtttcaggttggccaggctggtcttgaactcctgacctcaagtattctgccctcctgggcctcccaaagtgctggaattacaggtgtgagccaccacgccctgcctttctcgcttttcgatagcattttaagtgaggcgtcattattcctgtgagcagatggggaaactgaggctctaaaagaatacatttcttgtctgaaattatgccactcgcgagtgacagagctgggatcaaactatctcacagcaaagcctgagggcttaactctggtcttgtctgccagacctgtgcccattcattttgttcttggcaggtattaaattcccatcgttgcttttaccctgtgttttctcctttgctgtgtccatcacagattctgtgttcaggacggatctttgtcctcaccgacattctgcttttccgtcattcatactcagtaaaactctattgagtgcctactgtgtgccaggcccggctccagccctggggacactcaaggcaccaaacaaaggccgttgctcttgtggggtgatgttttactggaggggatgcaactcatgtgaagtcagtaagtacactctagagtgtggatggaggctggcgataaagggaacatggaaagcagataagaagggtgggaagtggaggggctgggacctgaaattttacctggagtggccaaaggctttgctgagaaggtgacatttggacattacactcatgtgcaacccgtttgcaggccagggccattagaagtgttgaggttgcctatgccaacactattaatttctgtgagcaaaggcagggtccccaccatggacagcagggtgagtggctgtcccacagtgggagcaagctgggtacccttgggcccactccgtctttgcttcttttttgcagggctcctaatcagacctggatttgagtctttcttctgccatttccttgaccttgggcaagtcacttaagagacttagtgttggccgggcacagtgggctcacacctgtaatcccagcactttgggagaccgaggtgggtggatcacctgaggtcaggagtttgagaccagcctggccaacatcgtgaaaccctgtctctactaaaaatataaaaattggccaggcgtggtggcatgtgcctataattccagctacttgggaggcggagacaggagaattgcttgaacctgggaggcggaggttgcactgagctgagattgcaccattgcactccagcctgggtgacagagcgagactctgtctcaaaaaaaacaaaaacaaaaaacctcagcgttcctcctttccctacttgtgtattgagacagcagtgtcttccccacgggactgctgtgaggcttgcccatcgagtccctcctgcacaatgcctgctctgtgaagcttgtccttgtgtctgctcagcctgccccaggacatcatgcccagccaccctcttcctgtcgtcgtgtggatctcctagggagggtgccaggacagagctgctcagccagggcagggctgaggcttcccaggggtgagtcctaatgtaggtaaaggcagggaagtgagaccccaaaagcagttaaagcaaagagcagaagcccaggggcctgaggcttactgagggagagcctcctgcttgcctggtgccgtcctcagacctcggccctcacatggagtcgcctcctgtaggcgccagttcacagatgaaggtgctgaggctgggctcctcaccgggctgcatagtgacacgatggtggagctgggaggaacctggctggcccgacaccccagttaggcttgtgctgaaagggtaagatgttgcaggggcagggttgtgggggcctgaggaatttggcttgcagcttcagattggagtctgaggatcgtgggagctactccaagtgagctgatctcatgttgtgcagagatgagaggagaattgaagctgggaaccatgggattcagccgtagagttccctcctgtgacagacccattcctggctctgttttgggggcagaggagagggagcatggaacaagtagttggtatttctttctttttctttagagtcaggagtctcactctgttgcccagactggagtgcagtggtgcagtcatagctcactgcagcctcgacctcctgggctcaagcaatcctcccacttcagcctcctgagtagctgggacaagaggcacgcaccactatgcccagctaatgtttttattttatgtagaaacaaggtcttacagcgtttcccaggctggtctcaacctcctggcctctagtgatcctcctgtctcagcctcccaagctgctgggattacaggagtgagctactgccgtttttttgtttgtttgtttgttttttgtaaagatttaaagagggtccatgttagctgttcagtgttagtaagagggctctgtagatttacatgcctctggatcacatggaggactcctttaaacatagccggctggacctcaccccagatgtttgcattcggtgggcctgggcagggctatggatgctggtggtgctggtgtggggaccacactctgagaagccctgccttattgtggctgggggtcttctcttgttagggtttttttttttttttttaatgtcgtgggtgacatgaatatagggcacctctctcaatgtaatgtttactgtcatttcatgattacttgtgcaaatatcgtagacatttactttttttacaaaaagcagtgatgatggaaatttccgagttacttcctgtgttctcttgctctgagtctgtgcgactctggcgtctgacccaaattagagatggtaattgagtcactggtgactgtggatgtctgtgatcattaggatattgactgtcatgcaaggaatcgaatttaccccaaatgttcagccacctcatcagattttccataaacttgatgttggtatttaagagaggcaggaggagttgtggttttgagcctggcctctgcctggttcagatcccagctctgctaccttgagtacagcctgggcaatttacttgtcctcatgtttccatttcctgatctgtggattgaaggtaatagaatgaggtaaagggcccagaactcataataaatgccccatcatcattggctgtgttgttcttgtttcagtgcccccagcaccttttgatgtcagagagggccctggaagtcctccgtggtggtgtttgggaagagagctccccgaagcgaatggttctcaaagggtgatcccagaccacagcatcagcaaaacctgggaaggtatgaggaatgcacattctcagcttcctcggggtccttctgggtcagaatctctgaggtgatgccgagcatctgtgatgtggcaagccttccggagattctgacacacgcttaattttgagaaccactgatctgagtcttggtgggcagcacctgagacaggagggcatggatgacacctgagagacgggagggctcaactctactggccgtatgtgtgtgcatggtgtggggtggtcggggaggtcagtgtggggaggatctttgcatgctcaggaaagccaggtgcccagcagctgtgtaagtaaccagggggccagcactgcacaggcccttgcctgccaccagccctactgacattcttcctagaacaagcatgacgcatggcttttctagcacatggaatcctggtcacaccactgctgacagaagaggcttctgataaaggccatttctcccttccgtttctccccgagcacctcctgcatcctatctcatcgtgggcccgcgtctgccttcctgttctcgaatcgctgaggcaggagtcatggcccagcactattttccctcttccagtggcattctggggttttattccgtgaacataattaccttgtttttcttcttaagccaattcagcttattcatgcctcttccctcatgttcccactgcctttctcttgtttggttgcacaatattccagatattttctattgtctcctctaccccgtggttacaaaatcaaacaggacaaaacagctgtgcataggctgtggagggggcgccttgggagaagctgggatggccccttcctttccaccctggctcagctgctgatggaatggaaggtttcccggagaggcagcagtcagaggagtggtcggggagtccctggggctgccttacgggctggttgcagcgtttcctctgccacagagctgcgaatgccaaggtaaacatatgttttgagataaagtggaaaccccaggaggttttcatcctagaagaggaagcaataagacagtcacgtgttggaccaaggagtcgttttcccccaaacccagctttgcgcaccctgtgtgggaaagttggagggaattggaaaagcagggattatggatggggccaatgagacaggtcacagagtgcaagaaggggcttgaagaggcagctggctctgctccttcccagtacatgactgtgggcccgtatccttcatcttccttactggtagcatcaggactggactaccatatgccaggcggtgtcctggggatcaaatgtggaacgaacgtaaagcatttggcacagtgcctgtctgcctcgtggaaaacggtggctgcgagttttattagctctttctagtagtcgactggctgttgtactgtctttgtttctgaaggtgcccgatacacacttctaatccatctgcaatgcctgtccactccaccttcaaaatatattcccgatcagacctctttgaaccacaccggccattcctcccacggtccaggcctgtgctgcccttgcctgctgggtctcctccctgccacggagcttcctcttcaacagttttttcttacatgacaggcagagggttacttttaagccccaaaccagatcctgtgggttccctgctcagaatcttctaacagcttctgaagacacttaagatagaactgacagaacagtagggcgcccaggacatgtggcccagggttctcctgccaacctctcttcctggtgctcactcccgggaagccacctctgcctcagcctcctccttcccttgccaggctcgcctccatctccagcttggcacccataatcttcctgggcccggcacactctccccctgacatctccataactcgctctcttcccaccgttaggtctctgttcaagagcatctcctcagagagacagaagcggcctctccatttagttttcagttattgctggacattgcgtgtttctctgtcctttgcctgtgtgatgggaacacagacccagcatcttcacgcccccactgtgttcccatcgactgcacatgagagatgcaatgagttttattaatacaactgatttcactaatcaaaacatttaaacatatttttcgagctaataaaacttgcccatctgccctgtaatggtatttggagagatgaaggactcaggacacagtgctagggaatttccagttccgtttgtgactcctgttgaccatcttaaaaaacggcgacttatatgacttttcagtgagttaatcttctgtattttttttttttttgagatggagtttcactcttgttgcccaggctggagtgccatagcgcaatcttggctcactgcaacctctgcctcctgggttcaagcgattctcctgcctcagcatcctgagtacctggggttacaggcgtccgtccccacgcccgactcattttttgtctttttagtagagacgggatttcaccatgttggacagactagtctggagctcctgacctcaggtgatccaccatccttagcctcccaaagtgctaggattataggcgtgagccaccgcgcctggcctcttctgtaccatttaacacccttttttatctgtgcagtaggtagaggaacctcagattcaacccatatttactgaatacctcaatactctccctttaaaaactgacatggggcagtggaccttggagattcacggcgtccctcctctggggtggagtgtgagatggcctctgcctgtgagacctgctgcagtggaatcgatctgcgccgcctccaaccgagacctgaagacgcaaattccatggtgtcagtgtgaagaactgtgaggaggcagtgagaggagggcctgggcagggtgtcccgcatgggccaaatggccaagtcactcctgctattcaggaaacaggcttggtggggtcacataacttgtccactgacacaggaagacttcagttctggtgacttggtgtcctgcacttaccgccagagccctttgtggctgcccagcgtgagaccttcgttgccatcaaaaggaggggaagggaatagccgattgggcatctacgtcccaccagcgtgtttcatgttaagaagaaggtgggtttactgggaggatgtgtcacctctctgcatgacttgatgtgagtctgggaacaccaagtgttcattccatgtctggcactattttcatctccatcaggctttcagagcccagggatgatgggtcgatacccgggacttgaacctcacatctgccttgaggggaaggagaggagttggggaggtgctggcagggggaagcccacctcccaccctggctccatgctgcaggcaggtgtcctgcccgggtggattggcttccgctgctaggccagggttagcctagttctggtgaggaaagttctccattctgagccttgtaatgaaatctagagctgcctctggccaggtatccccaacccaacccaatttttctgcctatctcattggaagtgtcaatttctttattacttcagctgagggaaaacaggtcttgacactaagacaattcaagtgggggcaaggtcgccgtgattcatttttgttactctgttgagttctagagtaagtataattcacaagtaaaatgaaggttcaggaattagatgtggagactaaggacgatgccaagatttattctatgtctgtgctcagcctaaattgggctcaaaaggaagaaaaaggatgaggaattactacacattattcgcttctcctgaggatgacggtaagatgacctaatacaatcaggggcgaatctgaggccagaaaatgcatacccaaagctcagaaggaggcaacagaccattgagacccttttggacaagactgagtgagttcaagaaaaaccggcacctgaccagccaagtaggtgattccaaactcactcctgccctgagaacccttggacacaccaggaaattacacattgtgtgacatcagcttgggagaaggcctttttatcccaagtctgatcagcttctgtaacacttagaaaaaggatttgattacaggcggtcagtggagaaggaaacagatcaccatcagtaactggccaggattcttttcttcctcattcatggtccctgtcaggccagcgaatgggaggtgctgatgttcctgtgggaaggcagttatcccctgtggattccagtggctggtttatgaaataagaagcttatgcacactgggaattgtctttaatgaaatgagaattagccagagagttagacataggggtcattgccaagaggaattaacactgaagcctcaattaaaatttccactggattatctgataagtagttgtgcctttggtattttattgtctttgacaaatggcatgagttcagaatttgaagcaacgtaggccataacataacacggtcctgaaaataatgaggcacaccattgctagatacaaagtacttaaattccctgatggaagtatttattttaaagactgctttggattatcttcctcccaggatgtgcaggcgctctctctgtgttctgatggggttgccaacttcacaattccttttggtgccaacagagttctcagcaccaggtggaaagggtggctgccttccaagacataccttgctttattgctaatccctctgtctcctccccccgtgggctgttcttgtcccctggctgctgggagacagagtgatggcttcctaattgggtccccaggcagtcccaacacctgtttcaggaggtgtttggtatcaacagtggacatgtttccgaagctaggtgtgtgtgtgtttaaattcatttttataattttgtttcttccaagcattgtcgttacccactattggtgccttcatttaaacaataaatgctttcattcaaaatgcaatacttcctaagcttttgctgagtgatcaaacccgaaaaaagtgttaaatgccagtcactcccatctcaacccagtggtcaggcctgagatagctgttatgaagatgcctcaggacaattagacttttcaggaacttttcggctatgatgccattgcaatttgcagaccatcccagtctaaccccgtttcctccaccccttgctctccttgcaccattgctggcctcagatccctccctgctgtgaggtttggaattagctcgtgtgtctatggcatggatgacttctcctccaactctgtaccagccagcatctggaaagagttatacacaggaatctgttactatctagcctgccctcagccctggatgcgcatctgatgtggagacccactggacgctctgtagaatgtggagttctctttgaaggtaccacaaagataggggtctgcaagtgtggctttcgtgcaccgcgggtgtcattcgtgacgtgtttgtgctcttctgcaagcccaaactgcggagaaagtttaactgagaaaaccacttattctgagttgtcttctcagttaatatgcccctggttatgtttaagtgcccggtgttggttatgctcgtgcagcttggccaggaaacttctaggacttcagcatgggatgggtggttggcagtgggggcagagtgagttggagctagttgatgtgctgtgggtgcatcctccttagctgtgagggaggccaacacaggcaggctttccctgcactgatcatctcaggtgactgtgtggcaatttcctgctggtcagggaaggtgctgtggcctttcatcttggctctgtgtccacctgctcactggagctccatacttcaccactgcaagagagttgcccttgcgttctctgtctacacttcaaaggaagatgtttgcatttggtcagggagagggaactttgcagttagttctcctgaggctctgtgggtgttttgttgtgggaggaggcgtgtcagcatcttcaacggatcatgtgacctttgagtggttgcctctgggacatcatatgattctttgaggtcaacagagggtggatcctttggactgcagccaggagactgggtcctttttagtttagcgggaccagccttgctgtggttctcagtccagagagaagacttcctgaatgtgaagtgagcatccaggtcaacaggcagaaccactgtgcgtcatagaacagaagccactgaaataagagtgattgtcccatggaccaagacatcagcagagatttgtaaggcaggaatttgcaagggaaggcatcagcaacactcatgtttcacgtcagagttgcagggcaggatattagataagaggcctgggagtccagtcaatggtcacttctgtcaatgtggggagggggtggggagagctacctaggagggagagtgattcatagcctgaaaccatctttgcgtcctatttgcaagctgttgggttgtgcaggacttaaagctgtgctggctcctcagcacctgcagtgtcagtggtgagctactctgttggggtcttcagggatactccataagaaccatcttcccctcccaggcttggaaccagtggtagtcacagtgtctgtgagcattactaccaaggaagctgattggagaagggggcccaaatgtcactgaatgtttcaccttagaatgatccaatttgctccctgaaatttaacggaagcactatccaacttctcttctgcaactgtcacagacaggaccgcagggcaatggccccctcgtagaggcaggtgacactgtgggtggtgagcccaccacagggccccatcctcccacaggtaggcagggagagctggggttggggggctagtgagcaggccagctccttcccccagaccattggacagacaagtcacctgcccttgccaggcagagcattgctgtggcagacctcactctgcatggaaacacgaggggtagagaataggagttctccaagagcatgccaagtgtggcatttgacgtttcatgccctcacctgcctgtgtctgttcagcgctctctcgtggtctctcacatgtccacttgggctgggtctgtgtcctcatcctgccctaaatgtacctgctcactctcaccctcgagttttccttttctcctcggtccagtccctctttcagttagttcattaatgcactaattgatcaataatgaattcagcagtgttcatgagcctctgtacctgtcaggctttgcgtatggtaccagtattatagtgatgtgcaaagcagatgagattcctgccttcagaacacttacagtctaatcagagtgacaggcataaaagaacttgtcatacaaatagatatgatgataaactgggccaggtttcttgaatgcagaggtcacgcgctggatggtgtcaaagtagactgttctgaggcctttcggagatggtaacatcaaggctaggatccgaactgtgagaaggagtcagccatgtaaagatttcgggaaagagcgtgtaggtgaggagatggccccttctgaaagccttgaagcaagaaagagtttggagcatttgaggaacatgaaggaggcccagtagtgagaaataaggcagggctgtatctgcagggccttgagggctccacaaagcgtcgtggattttatctgagtgtcgggattcatcatcaaagagctatgggcagatgacgtggccatgtttactgcagtgggagcaaggtcaggaatgaaagccgttgctctaagataacagtgggtttggaaggtattgctagttgtggacttagcagccatgcccctctcttatacattgctgggctgtgtgcccaccctcaggtgatgaagccggtcacgacagtccattccttttcctggataatcacttacctggtctcccttgcagcagtggctgtgcaatcccacgtagcccagggaaatctaagcaaaggcctgctggcagcctcagagaaaggttttccaccctgggaagctactgtgtgaggacagtgcttagggcttctgcagctgtcttgggaccatgagggaaaggccaggaggaccacagatctgtccatccagcgatgtgccatcactgggctgcctgatcaatccagggccgcctgcctctccagacttctgtgttgagcaatggtgtctcgtctctgattaaaccattgttttctattacttgcggccaagtgtacagtcatttaggggagataaagaaaagtgggtggatctgagatctccatattgacatgacttagtaatgaattggaggtggaatggggaggattggagggggtagtgaggatttctgatgtgggtgggaaagacagaggatctcagttttgctcccagcagaacagacagtggttatttgggttgaggtgaacccactttgatttggagctgggcctgagtcagaggtttgactttagcctgtgagaaatccaggtggaagtgttcaggagatggttgaaacacagatctggatttgaacagcgagatctggctgagggggcactcggggttcatcagtgctcagaggtggggcctgaggctgtgggtagggtttcatcatggtgggagggaggagagccaggagaggcccaggtgggaacagctactgcttttcttattctgcccaggatctttattttagtctcttttgaaatgatggacgtcatatatttgtcacttaattgcatcaaatcacaaatattaggctgactcacatgaaattgtcatttttctagatcagaacagttgattattagcaattgtgtaggactcaacctaatagctgttgttaccaactgtgtaccagatactgtattagatcaaaccaaccaatgaattctcacttattttctgtttaaatttaatcccatcactcccatgtataaaactcaccattggtttctctgcatccacaaggtaaaatgccaaccgagatcatcctctgaggtcttttatggtccatctccacccatgtttgctgaaagcccctgcactctcctttccaggcatatcaagcccagatctgcaaatgcagtgagagagttacaggatttctccagaatcccatttccactcggtgtctagtcttggcctctgcatgtgtccatatcacgagttcagtttcacggaaaagcctctcttcacttcgtggtctggatgtggatggtatacagttgtgcttctgattgtattatggtccctcaaaaccacatctgattatgtgcctggacatttggggtttcaggcctgaagggccaagcctccttttcccccggctgactcctgcttatctttggaggcgtaactcatgtcatgactgctgggtagtctgtggcctccctgggaactccaaggacccagatcctccactgtcttggaacctctctggctgggctgacatcaccctggagcagcacccagaacacagaccatgactgctctgaggacggaatggcacagaggccatgactgctgtaaggactgaatgggcacagaggccgtgactgctgtaaggactgaatggcacagagaccgtgactgctgtaaggactgaatgggcacagagaccgtgactgctgtaaggactgaatgggcacagaggctgtgactgctataaggactgaatggcacagaggctatgactgctataaggactgaatggcacagaggctatgactgctataaggactgaatggcacagagaccgtgactgctgtaaggactgaatggcacagagaccgtgactgctgtaaggactgaatggcgcagaggccgtgactgctgtaaggactgaatggcacagagaccgtgactgctgtaaggacagagtgggcacagaggccgtgactgctgtaaggacagaatgggacagaggctatgactgctataaggactgaatggcacagagaccatgactgctctaaggactgaatgggcacagagaccgtgactgctgtaaggactgaatgggcacagagaccgtgactgctgtaaggactgaatggcacagagaccgtgactgctgtaaggactgaatggcacagagaccgtgactgctgtgaggactgaatggcacagagaccgtgactgctataaggactgcatggcacagaggccgtgactgctgtaaggactgaatggcacagagaccgtgactgctgtaaggactgcatgaatgggcacagaggccgtgactgcttaaggactgcatgaatggctgctgctggggtttctttctgaaccatcggggaagctcccccaagtcccctttgtcccctcttgggtcctagtttgagccatgtgctggcactcagttattttaacgaaaccatatacatttttgacatgacagaggaatgatttgtatgttcttccccaactcttaaaaaaagaattaaaaaggatcttttagcccttttataaaatctttgctatgttcctcagaaggcttttaccaagatggttaagtatgtttccaatcttggagcaatagcagctgcatgttttgctgcaactggaggaaagtatatttcttgtggaattcagcctacaaaggcaggttccccatggccgtgaaattggtggtgagtaacagggaggacttggttctagcaaggcagtgatgagcaaggcagcctcgtggatccatgacacatccaggggctcattacttctgggtgctcatgggtccagatggaatgcaggtggttaagtctgtggggttcttgaagttgcctgacaagcttcgcagcttcctttgctgcttctacccttaaaacctgtgggtggccctgttttgacaaagagtaggactgttgagagccttggggttggccccggaggctctctctggaagtggagggattcccctttcctagaatgtcaatgcctggtgcggtcagtgcaggacaaagagtgttctgtgtctctgtaaggctgcttgggagatgtaatcctaggagaaggttacagcagatcagagagagtactggggaagcagtgacctttcctcgcctttgcactgggggtgaagaacgaggaccttataataaaggagaatattttgcctctgcacaatggcaagcgttttcactctcaaaccaaatcccttttgaggtttttttgttttctctttgaaatcttgtgatgactgagtaatttatgatgtagtaaccttgtctgtatctcaattcttttacccttgtaaacatctgctgcaaaaatcacaaatggctggctgcaaaggaggaagttaccgcccaccaaagcctccccatcctgttccctctccctccctggtatatctgtaccccccaccctcctgtactcactgcacttagacaattgcatttgctctgtctctgctctgtaatcgccaagtacactccaaaggcggtgggcagtgtggacatccccaccatgatggttaataccgagtgtcaacttgactggattgaaggatacagaatattaatcctgggtgtgtctgtgtgggtgttggcaaaagagattaacatttgggtcagggggctggggaaggcagatccacccttaatctggtgggcacaatctaatcagcttccagtgaatataaagcaataagaaaaacgtgaaaaggagagatgggccaagcctcccagcctacgtctttctcccatgctggatgcttcctgccattgaacactggactccaagttcttcagcttcgggactcggactgcttctccttgctcctcagcttgcagacagcctattgggggaccttgtgaatgtataagttaatacttaataaactccatatatatacacacatatatacacacacacacatatatatacacccacacagacacacccaggatatatatatgtgtgtgtgtatatatatatacacatacatgtgtatatatacactatatgtatatacatatatacatgtatatatacacatatatgtgtgtgtgtctgtgggtgtgtgtgtgtgaagttctatctctctaagaaaaccctaatacacgcacatatgtgggccaccaggacaagagtcactgtgattctcattcatctcctcttctcagagtgagtccctgccttctttgccctgctcctggcttcctgggaaggcaatatccagcttctgcccccgtgagatgagctcagggccagtatagagagagagagcactttgaaacatggttatatacttcatgcagaagtagcaaactagttactcaggctgcatctggtctcaaacatgttttgtttaatattttcttattagtcttctaatactgaaaaaaaagagtcagtgctttttcctaagaaaggaaacaactgactctttggtggctttggaaaaatctggcacctccaggcgcacatccccacgtggcagcagtgagctggagctaaggcgtggctgtcccctttagacagtttccagtttgccttagtccccaccatgtccttttgtctccctcccctgatgctaagtgacaggtgcctctcgtcctcacattgtgctgtgactttccttgtggtgcagtaagagaaaactgaaatgttcctgcacccgcatctttatcaaaagtgggaaaatggaaaatagggtgagagcgctgagtgtttcaagggaagaaatgtgaaagcctagctttcttcgtagaattaaatcccaggaaacacccctttgtgatttgaatgccagcaaagtgtgtccatgttagaagaacacaattcaaaagaccattggaagggtgcctgcctcccccttaggcttcctgcctggtccgtagcattcgagttggtcactcttactctgaaaaggccatttcttaatggcagccacgttggcatcatgggcggaacagtttcttgttgtgcaggagtgtctgccatactgcagagcgttggccattttggcctctgtccaggcatgacccctcagtcgtgtaacaactcctgcccccaatatttccagacttttccggtggagaagtccagccctccagggatgttggatggtagatgtttgtgtcctaggatggactgggccagaggacctggccccaagctgtgtgcttggttcaggggggacacggaggccacccaggtgcacatgttgcccaggttctgtgttctcccagtgcagcactgagccagtcagatctgcctcattccaggcagggctgcccgggttttcagaagatgcggcagaacaaagccacgcttatttgaatcatgtctttctgttcagacgtgctgtggcccctttcatctacgtgggctggcaggagcatctggtctgcccgccagcatggtattaagagccatccacagccggatgccaggacttaaggcagagaactgtctgcatgaagcggcacctcctcggtgcttacctggcactctgcttcctttctgggatctattttggtgtctgtaccacagtccaccttgttctgtgtggatgagtcttccgtagctacaaggaaatagtcacgttgcaaattgctgggttgcagctgatcccgctcctgcagtggtgagatcagactgccatgaaagcactcttaaggctaaggcgtgacttcgtttaataaaatggtttgcacaaatccacctggttgactgggtcacagactgtgtgcctctgtgtgatgatggcctcgaggccctcaggtgatgcctgcacagcttctcagagaccccaggcggcctccggcagaggtgtcagcccgagagcagaaggagtgtgcaaggccgggccaaccccgagcacaggcagaagtcaacaagcagccttatttcaggccctgttaagaggagcagaagttcttggaagtaaatggaattctggataatttcacaccagctctcagaccacccggcaaacctgtcccagaggcactcttcatccatttacagaaacagccttcgggaagaacttgagacccatgagaatgacgtgggagtttgcacacgtgccaaggcttcagcaagtggtcatgactgacttggcgtatggctgattttagagcaagggaagactcatgtattgtaattaaagggaggtggaagtatattagaacttccgttatctcagggcagagtttgttactccaaaagaacaataggtattatagcataaaatttcccaacggctgaccattcagaacaactttattcacatatagtttgtacaaatagtgcagattaccaccttatatgagtgtatgagctgtccactactgtagcaaaattttttctctccttaaaacacacacacatatgctatgcgggactcaagagtctacaggcagtgagacaaattctgtcactgttaaaaaaaaaaaaagtgaagtttattggcgtagctttagtgggcattaaacatttccagcatatttttgtgtatttcaagaggctaattgtgttatttaattgagaagatttgtgagcatcttgtaggtgtcactgtttaaaaaaaaaacacataagcgtttgcccgtcaaactggtggtattaaattggaaatcaggaagcatgttcccagttcctcaagaaattaaacatagagttattgtataggcagctgtttcactcctaggtaggtacccaagagaattggaaacataggtccgtgcagaaacttgtacgtgaataatcacagtcgcattatccgtcatagtcccaatgtagaaactacccaagtgtccatcagttgatgaatggatgcctcagttgtggaatatccatgcaatggaatgttatttggcaataagaagtactaacattacatgctgtgacatggatgacccttgacaacgttatgctaaatgaaagaagccagtcacaaaaggccgcatatcgtgtgattccattaggtgaagtgtccagaagaggcgagtgcacagagacaaagtagattagtgggtgccaggggctcggggaggaggaagtgggctgtgatctcacatctttcatcaccctagctataagagtgatgaaaatcttctcgaattatgtcatgatgatggctgcacaactttgagaaagtactaaaaccactgaagcatatacttcaaaggggtgaacttaatggtgtgtgaattatatcctaatacaaaaatagcgaggtagagcagatgggagaaaatattatcagttgttacatctaagtggagggactagagctgatcatgttactgttatttctacttttctgtgtttgaatattttcacagtgaagcgttcgggggaaagaagaaaggtggcaaagacaagaaaagcatatgcttccgctgccaccccacttaggatggatttatttcagttcaacaaaaaagacacaggaggcgctggtgacatctcgggctactgaatgtttcccacttttcgagggttagtctgacccttgctggggagtgtgctggtagggacgcctgacatcgacatgtctgctgtccattatgaggagtgtctaaggccagactttcaggttcatgctccttgttcaataaataaatgagtggatggattggtgatgagacttcatgcatcagaaggtaccatggcgatgcattaggaatagacatgagcctaggatgtgaggtctcattttccttctctgcaaaatgggaataataaaattgtacccgcctcataaaattgttgtggggtaacagatgtaaagtgcttattgcggtttttggcacatattattttaaaacttgttataaagaatgctcagtggaaagtagaaaggattaaaggaagaaaaggaactagagggatgaatggtttgtatctttttgcatgaagggagcatgtgggacttctgaatgcttccaggtttctagcattcccaggtcagatgaaggggccttttacttttacccagaacagtcagaattattctttcctgctgttgtgctttctccttgaagttgccatagattctccttgtccatgtgaagactttgagtgagccaactagaaggtgaaattccagggtctctggatgcgttaggaggcagtttgcctcgaactgggatcaaacactgggtttgagatagaagaagccctatctgaggacgataacgctctctgattatatagggatggggttatgagtggtggcgattttcctgttttaagttcttcagtgttcttgagaatatctaccatgttatactcttataagtaggaaaaaacattgcttttaggaaaattttgaccttgcatgctggatgacatctttaaaactgcttttttgaagtacaatttgcataccataaagtttacctaagctatgtactaaagtggtttttagtatatttatagaattacacagccatcaccataatttgatttaggaacatttttatcaccccagaaataaaccctgtactcgttagaagtcattccacatttcctgtcaacactcttgtccccaagcactagtcacccactaagctgccatggatttgcctgttctggacatttcatctaaacagaatcatacaatatgtggccttttgtgcctggctcttttcatttttggcataatgttttcaggggtcatctacgctttaacctgtatcagaacatcatacttgttctagcatgtgtcagaacttcactccttttgttaaatcatattccattgcatatacatgtttagaggtacatatgcatgtgtagatggacgtgtgcatgttcaggtggacgtgtgcgtgttcaggtggacgtttgcgtgttcaggtggacgtgtgcgtgtttacttgcttatctttcagtgatgcgtatttgagttcttcccatttttttgatattgtgaacaatgtttccataaatattcatgtttgagtttttatggggacacgttttcagttctttcgtatatgtgactaggaatggaattgcttgaatcagatggtaattctaggttgaatattttgagacactgccaaacgcttttcctatggggagtgtctacaccgttttacattcctgtcagcagtgtaggaagattctgttttctctgcattcttgccaacacccatctttttgattatagtcattctggtgggtgtgaagtagtatcttattgtggttttgatttgcctttctctaatggctgatgttgaacatattttcccatgcttattgaccacacatatttctgctttggaaaaatgtctatttagatcatttgcccattcaaaaattgtgtttggtttttattgagttggaataattttttttgctgagaggtggtgttggattcttcccaagaattttatttttaaatgacaaaccataattgtatgtatttatggggtgcagtatgtttcagtacatgttacattgtggaatgatcaaatcaggctagttagcatatctgtcatctcaaatatttataatttccttgtggtgagaaaatttaaaatcgtctgtttggccgagtgcagtggctcacgcctgcagtcccagccctttgggaggctgaggtgggcagatcacttgagcccaggagtttgagactagcctgggcaacatggtgaaaccctgtatctacagaaaattagctgggcatggtggtgtgcacctgtagtcccagccacttgggaggctgaggtgggaggatgccctgagcccgggaggtcaaggcggcagtgagcactgattgtagcactgcagtccagcacttcacagtgagaccctgttaatcagtcaatcattcagtcattccttttttccttcctcttttagctgttttgaaatatatggtgtacagacttgtaaggattcttcatgtattctgggtaaaagtcacttaccagatagatgattggcaaatatcatttcccactgtgggaaccttttcactttcttgatggtatcttccgaagcataaaaaatttcaactttgatgtagtcattttttatcacttgtacttttggtatcatacctatgaaatcattgcctaacccaggatcacaaatatttacttttttgttttgtttgtttttgagaagagtcttgctctgacgccccaggctggagtgcaatggcatgatctcggctcactgcagcctccgcctcccggattcaagcgattctcctgcctcagcctcccgagtagctgggaatataggcacccaccaccacgcccacctaattttttgtatttttagtagagacagggttttcccgtgttggccaggctggtcttgaactcctggacctcaggtggtccgcctgccttgtcctcccaaactgcttctaagagttttatattttcagtcttacgtttaggtctgtgatcccctctgagttaatttttgtgtatgatgcgaagtaggggtctaaattcattttcttgcatatggatatccagttgtcctagtaccactaattgaaaagactgttccttgcctgccttgtccgagatgacattttggtgggaaacacaggtattttatattgtggaacatgaagtctcctgtttatttttcctatcagaaagatgttgctgaaacacaaacccatgtctcatgtccctgttgtctagttataaatttaatatcaactcttcctcttcaaaacagcattttcagcttcaggaaactaattttattatttttagacttgtgtttgattaaatacatgggaagtctagagcaggaaggcaccctgacctcacaaaacagaagaacatgtgatgtttccaagaagtgcattcaatgtgtgtttcgaatctaatcttagtaaaatattgttacttaattattatgaattcacctatctcaaaatctgaaaaagttttgtgaagagttctctttccccttgatgagcaggggtgaattgttaggtgggcctggaacgtcaggacctaaccaaggtgggcgccataggcctctggataaagcatcccggtagcttggtagacagcagactgtgtcaggataggtgtcagcatcgggaaaaagggttccgtgagcttgtctttaaaggcagtcagcgcaaaatccaggtcaggcaaggagagcaaaggtaaggaggcacagtgcggttccagacgttgtaatacgctggtatcttgtcgtggccaaccttgtcctggcccccagcgcagataaagagagtggcctctgatgccggtgaaggtggtgttttcccagtccccagctctttgctgttcttcagctttccaaatgtcatgttgataaaagcatttagaggttcacagcctctacgctggcaactaaactgccgatcattgtgaaattgtcctgtgccttttggcacagagttttggcttgagaaatactttctgttaaactttaagaaaaaatttggacttggtcaaactaattgcagtgttagataatatttgttcagggtttactctgaacattgcttcttctctcattattcatttaatcctcaattccacgaggtaggtgttcatctcatcttacaaaagggggcacaaggcttggggagatgaaacaattgccatagtcacccaggtgggaagtggcagagggagactcaaatgcagaccccagtccagagcctgcccttctcaccccgctcagactctgctggcacaaagagaaatctccctgtggcttacattcccaagaatggccaagggagctgaggatatgttaggaacagggactcccgagtcagctctgctcttgtaagcacagtcttggttctcctggggagagtcagcgacacctaaactctgagtttgagttattcatcctcaggcaaatggtgtcttggaggtcgctggccatcctgccagcagcaggatgttttgatacttgtgtcttcgagcgggagaagggaaatacactagcagctccctttgcagaggcccatttgcccttacctacagagcagcccaggggccttgtgcatcatccttacacctggggagggaccaagaagggcactccagggtctgctgactgagtcacttaggccaggccagccctagacttccctgactatcagccagaaggccaacttgttacccaagggcagcagtgaccagggcaggtatcttaggggctgtcaacttctctgttggccatgcaaagactccacgtggagttgtctatagtgcacaagctcagataatgaaggagaatcggtcatactgaaatcaaggctagcagtgaggttccttctgccatgacaatgggacagttacaaggctggagctatcagaagaacgccagacattcgggccctaatccatctggtagatgttccagacgagatccagacatgaaatctaacaaagagtccaggaaaatcgtcagctcatctcacaagcagctgatcttccacatcaacatcttgcttcactttgggaagtttgcttcaccaacttctggtttaattgctggcctcgccagtctgtctgatttagtattgctactgcgttccaaacgcaggcatgagggctgcctctggctgtagccggaacctgccaggcacagtgcaggggtcaggaaacagcagtccacattcttgggttgttatgtttttggatgggagattctgtattgagagggttggaattagtctttatttcatgataccaaatggaggtgtaaaagatctatgggacaatagagcagaatgggcagttgtttcctcctaaaagagagttgtctctgcagggcagtaatgaacttgtcacgggacagtgcaacagcaaagctttactctttcatggtgtcgttgtgctcatagtgataatcgaggaccgtctcaggaagtgtgccgtgtcgcttgtgcgtatttggaattgggatgactagctaaggaactaatacagataccattaagaaatgatttcagcctcctgcgtggatggtgggccgagcaagtgaacctagaacattctgtgatttccagtgcccggaagaatagagcatggccaggtcagcagtaccattaagaagtggccaataaaagtgcgtatgcaatcccatgctcctccagaagatagtcttgaaggatggatcccattttattcctttaaaaaatttattttgccttttcaagttttttattattatacttttttaattaaaaaaacataattaccacaattacataattactacaaattacaaaggactacagcaagactagaataatgaatgaatcacttcagcctggaaagcagatactcccaataatattaatgttataatacaagctcattcaagtattttacatttcttttgtccctttttttggccttttaaatatgatatcttagcacatagcaaagataatgtgcgatgagcataaggtagaaccttcttcacaaagccagatgacaagttttcctctccagtgagaaatgggttctaagttcctatcttccctgtcgacatggctgaagggggagacggtggggttggggaaaatccagggactcttccacatgggagctactccggggttccattcaggagggcgccagataactgagataactctatccaggcttttttggcaaaacaaacaaacaaaaaacaaaaacaaccctcactctccgtaactagtcatctttcttgcccctcctcactttcagggccttctcagcagcttgctttcttttgtaaattcatcagaaaggagaaaaaaagagctaccatggaacaaaacaaaaacatttaataactttgacataggggctcagcacctctatctgaccctcaggggtcccggctgggacggggccagatggcccttctctactggtagtgcgtgtgctcccaggtgcaggagagggcaaaggagaaacctgccccttgacagggctgaggcacacagaccttctgatgtttgatactcaaaggttatgttggcatggatcagccttggaagggataggatgaatagaaggatctaggcaggcttttgctttgcgtctcaggtcttggatcccattttaaaatgattctcctgccttgtcttcaagttttgtttggtgagttgtttatgttagaccgagagagagtgatttaggaaaataacacagctcttttctgttcccatgctgacgggcactggcatgggatgttcccggggtgtgtgtggtgtgtgtgctgtggacggggaggaagccgtaaatgcttctttggtcttagaccctgacagagtggatgttgacatcgattttctgagcaatcatggtgatttgtcagtatccatcaaatggagaacaccatcaacaaatggcttttatatcatgtttttcctcttatcaacccaaaacaaatccagtttttagaaatactaattttcagaaaacagagagagcttgttacatttgtaagcatatactctgctgtgccaagtccatctccatggatgttcaattcatgttcaattcagttaaacataccaagatacaataaaggccctgcagttgggaccagggaacaggtattggccttgtccaaacagaatagagtggtatatataaaatttgtattttatatatacacactcaagattatacctttgtaaatcatatatatgttaaactacggatatgtgcatatccctcagctgtttttcttctttttttatattatttacaattacaggctaatttaaattggatgcttaactcagggtgctttctaaattaaatgcgtgcacctgattgacaaaaaggtacgcgtcaccctatgcattaccttggctgattcccactccactccaccccacccccgccccaggcataataaagagtcaatttggctgctcttttacaagtgacattgttggtgaataatgtgagacctttcctcatgttttctatgtgtcggttagttgagatctggcaacgaaaagcacattctacaaagcatttttggttatcaccttctgaggaatgcttgggtaacccctaagggctggaggataattttcccaggatcttttggtctgacttggctcatcagagagggttttttttttcctagggaatgtctttgattacattctgggattcctgtgtttagtgtttttaacctttctgaggttatggatccctttggaaattagatgaaagctataaagcttcttgcaagaaatacacacatgcatattagcttttgcagtctcaagggttaaagacatctgtacgtgagccttgttagtttgtgttttaaaaggaaactccctggactttgaatcgtagttggcaggcttctcctgtcttccctggaatgcgttatgcacgggcctgactgtgagtctgtctcccaggcttgctgtacattccctgggggcagagtcctctctacctttgctgcggttacaggggatctgcagccagactggctgggttcagtgaattctcctacttggttgcagcatgagcctgggggatttgcttaccctcttggtgcctcagtttccccatgtgtgaatgaggatgataatagtatcccttcgtggggtggtggtacgtgcacatgcatgtgtacatatgtgtgcatacacataagaggctaccgagattcctgtcagcagggacaggtgggtgggcacaacagcatggaaatgcagcctggatggtgacctgccacttcccaggatataaccacttcctgacttctacacacctttcagcctttctcagtgggtcaaattacttcctaaaatggccaatataccaatttatattctctttaataacatctgggagtctttaattgtgataaccttgccggttattgtcagaattttttgttttgtcaacatgctgggtgtgaattgatatcttcttgtgattttatttctcatttctctggtgacaaggtaggttgtatatctttttaaatctttggttttaggaattgaaaatgtcttcattatgtcttttcttcgtctttacctttgtttatggtaccttttatgacatagaagttttcagtatggatttagctagatagcccaatcttttttatgatctttgcttcctgtttcttgttttaaaaattctttgctactctaggaacataaagacctccactacattttcctctgacagattcgaagttgtttccattcttgtgtatttcatccattttgagtttgtttctgtgtctggcatgaggttgagagtttaattcattcatctccctgtggacacctgtggtcccagtgccatttattgaacagtctatcattttccagttattcaatatttttaaaagtcaggcaatttgcattttatgtaagctcttctaacttttttttttttttttttttttgagatgaagttgtcttgctctattgcccgggctggagtgaagtggcacagtctcaactcactgcaacctccacctcccaggtgcaaccgtttcttcagcttcccaagtagctgggattacaggcacaggccaccatgccctgctaatttttgtatttttatttatttatttatttatttatttatttatttatttatttgagactgagtctcgctctatcacccaggctggagtgcagtggcgcaatctcggctcactgcaagctccacctcccagattcacgccattctcctgcctcagcccccgagtagctgggactacaggtgcctgccaccacgcccagctaattttttgtatttttagtagagtcgaggtttcaccatgttagccaggatggtctcgatctcctgacctcgtgatccgcccatctctgctgcccaaagtgctgggattacaggcgtgagccaccgcgcccggccaatttttgtatttttagtagagacggggtttcagccatgctggctgggctggcctcaaactcctgacctcaagtgatccacccaccttggcctcccatggtgctgggattacaggcgtgagccactgcgcctgactagctcttctaattttcaattgttggtgactgattagaattttcatttcaatcctaaatgggccaaataaaacattcctgcagttgaaatccttctgtggctgccagcttgcggtctctgatgtagtgctttaggacaggacctgtggccctgaagacctgagattgaatcccagctccacccctcatttgctgtttgacctcggatgagttgttgacttctcagagtcttaatttcctcatcagtagtactgcaaggataataacaatatgtacctcaccaagtggtggtgtggataaaatgagatcccgcatgggactctttagtgcaggacctggtacacacatagtaagtgtctgacaaatgttagtgttgatcagcagccgctgcctcattacttacccctccctgttccagctcacttctttttttttttttttttttttttttttttgagatggagtctcgctttgtctcccaggctggagtgcagtggcacgatctcggctcactgcaagctcctcctcccaggttcacgccattctcctgcctcagcctcctgagtggctgggacaacaggcgcccactatgcccggctaattttttgtacttttagtagagacggggtttcaccgtgttagccaggatggtcttgatctcctgacctcatgatctgcccgcggaccaccacagaggcatagaggcaacctggaaatgtatgaaattgcttgaaaggtgaagaacatttgtttttcttgacctttgacattttaaagacagacattgacatgcatgctatttccatagtctgggatgattctgaaacccattgtaacccactggtaatgagctgcctccataagcatggaacagggacataccttcaccctgaagatgggacctgagacttggtaccatccactttctgccacgctggcgatgattctgaggctggccatcttccttgtctgccactgattctgccacgagtcacctgtttcctctttgtaatcttagtgcccacttgacttcgtggtgtggctctcatcaacattcttttctaagaggctttttttttttttaataaaatgtaatgccgtcatttttatatcctgtcagcaaaggcggagattgtcctagggcttcccctgggccatcagaagggagggcttgtcatggtagtttgactttagttcatgactgttgagtcaacacccaaatgatggctggcttcccatgtttgggttacttctttagtggaggggccgtgatgccctgccagggagtgatttatggacttgaactcaggagctggcgttcaggagctggtgcccagagctgctctgaggcctgggctgacctttgtgcgcagcccaagagcagggccccgagaggtgtctagaacaacgtgtagattgaaagagcttacccttgtcccgaggtttcactaaaagtccacatttcatcccccaaagaatgggctttgctgggctaagcatttagcaagaaatgcggttacttgttttgagaatccttttctttctttcttccttttttttttttttttttttgctaacttggcaaatatttccatgcatggccttgcattgtattcatcctttagaaatacggctataagagggagtgaagctgtttttcaaggttgtttcaggcaagtctcaagaacgtaccattggaagagcccttggaaggcagtaaaggtaaattagaaatggctcatatggtccgagaaatacgagtgatacaggtaaagcctggtgttgcaggtgaaagcagactttgactaatacacatcactatagcttcatcaactcatgacccttggatataccaaagacatacccttatctaaattgtccagtgaccttgactcttcccagattcttaaaccaaggcctcttctccttctatttcacatgcatgtgtgtatccctttgttatcttttaaattataattgaggcataatttacatatagatagtgtatctaagtgtactattcagtgaatatttgtaaactcatgagctttgtgtaatgatgaatgatgacctggatctagaaacaagacaatatcagcccccgggcagggcctcttcatgccccttctggtcactagtccctctggggtaacactgacctgactttttgatctctaaatgaattattataaggcaaacatccttgtgaccagcatcctggtcaaacagtagagtctatcagccctgcaggtgggccccgtcccagccacagccccttccctctgcacaggtacccacttccttggcttttgtagtgatgagcaccttctgtcttctggccttatgcatttgtgatttttgaatgagtcaaggtaaaaagaacaagcagcacatgtttctggcttgctgcatttggttctgcacacccggaatgcctgttgccgctcggttttcattgagattcgctaagcagaaccagcagcagtgctccctttttgtgagcctactgtgtgctaggggaggctcctgggttcctgacagacctggaagagcctactgtgtaccaggtgaggcttgcaacagacctggaagcttccagagctctctggcccatcccaccttcccctggagttctttgggattccctggggacttgaagagatgattttagcctccgattcttcagagctagcagtatattacttttataagagtcttttaaaactgactcctccctccaaggctgtgtttgagtgtttttagaacatctcctagggcctggggatttccagggagtctcctgcaaatagaaatggccaatgacgtgagtgatgggtccacgtttggcatgttgtcatgattctctcacctccctccctggtgccttagtttctcctgatggacatccctggctgtaacttgcaaggtgtaccccattgtcaaacgactgagggatggcacttctctgcctacagatgcagctggctaaggtgttgtatgatttgaaatacagaacacccccactccaccatattttttattcttctctaccaagcgtttttgtaactagttcaacctgatgctcctacaactttccagatcagttccttgttattaaaccatgtcgtgaacatcaaggccaagcccatggcgcattaggtggctgcagtgctgtgtggcaaatgagcatggtgagttccggtggccgccatgctcgtgggttagccatgtttgagcaaggggacccagggtgcactctgggtgtattagcttgtttagagctcctcttatagaatactgcagactgggaggcttacacagcacacagttattccttatgggtctggaagctggaactccgcagtgccagtaggactggtttgggataaggaatctctttcctggcttgtcgacagctgccttctcactgtgtcctcacctgccctcttgtgctcacttggagagagggaaagagggagggagggagaaatacctctagtgtctcttcttctttttataaggacccagacctgttggatcagggccccaccttgctgacctcatttaaccttcatcacctccctgaaggccctgtctccaaatacagtgacattggagattagggcttcaacctctgaatttcagggggacacagtttagcccataacagtgagcatgattaaaatgcacgtatttgctcttaccagcccctactctgccttcttcctggctccggctgtcatcacagttgagcagcctccgctcgtggccctgcctgtggctgctctaataactgtgattcaaacagaaatgctgagaaagatcaggattctaggcacacacctcagacagctgccttgggaaggctgagtcaggaatgtgcccctccttccaggtcgcatttgaatctctgaagggagattcgatccattcccagattccctttggggatatctgaccccatggaagacttagttgtcccgttccccacatggaggagattatttttagccaaaacataccacacttcttctcagcctcacccccacctaaaaccccagctttccccagggagagggagggcattctaacccaccagcaaaggggagacatttccagtgagagaagatagaggaggctgaaagctgtcactgaagtgggactaaggcaagttcattttaaaattattgaccgaaataggcgccaagcagtgcagtcgatagagaatgtgagtgtgttacagttttcaaaattcaccagggtccattgctgtaggagtgagtgtgggcatcaccctcatgctgccagtaaggggaggggtgtcctgggcatgcccatgtctacagacgtacactcaagtgcacacacaggagcctgcacacaggtgacggtgcagtgctgctgaggtgcagccatccggcaggctggtcagggcatggtgtttcctgaatgccaaatgctagaagacagggcttttctctggtagccagggagtacatgcagaggcccagaggtctcctgaaagggaactccaaggcactcatcacctgctgcattcacggtgccgcccgccgttgctccccacacagggagccacccatggtctgggaaagtttgccgagagagcggtcagaatgagggtgtggctcactgaggggccctcagctgtgacaggtgacccagagggaggagcagggatcagtgggtgcgtggctcagtgtggagcttcctctccagtctccacttgtttgccctctggaggggccagacctgggctcggtccctggcacagctgtctttcagagaccgcggcgcccacccttcaggccctgaggcttggcttggaacatccctgctcacctttctaccgcctttgtctctttgctgaaatggcctggaggctgcttcccctaggcgtgtgcctgctcagcttagactctgcccggcgcaaggcctgtgtcacatacaggcagtcaggaaacacttgacaaagtgtttgtcaaaataagagattttcaaggctcctctgatgtcctgaggtgaacctgcctgggaccatttctggtgggcatcagggcctgtttcagaagcccctgagcctctctggggttctccgaagagaggcacactgtgatttgacaaacgttacattgctccctggagaacccctcccacgtgatgggtcctgctgacacgagcatcatcttctctggcaggtgggtaatctgcacgatatctccatgcacttggctcaagttggctgtggccttttgaacatcaccacttattcgtttctctttccttcccctctcccggcatgttttggtttctagcagcaaactgttggcataaacttgtggcttctaacttgtaaatcccagggccaatttattcctccacttacccttaactcacagaacacatgaaaatgttatcttgtaggagtgactgctccagcccagggaccctcgagtcatctgtggggactcgtgtgattctcttaccagagacagcatctcctcctgaagtccaggatcctggaggtacctgggaaaccgaagccaaggacatctgtgtcctaagctgtggtctcattaaccctagggagcaaggccaagaatatgtagcctttcctgactctgacccataactgagaaccccatcatgaagcaacagctcacatggcgttacaacacacaaaccaacaaactgaattagcctgcaaggccataactgctgtatgactcccggtccacagaaaaccataattgccaaggggaaagtctggaaggcttccttagagaatgtgccagcacattcattgcttgggctggcagtggaaatgaaggtgactccttacctcactcccagccccttccgcctcagctactcttctgttgtaagaggttaggattttcccacccctacttgtgcttttgatgttatagctaagaaggctttgtctacaccaaggtcaggaagatttccatcttagttttcttctaagacttttatagttttagcactcacatttatctcttcaattcattttgacttatattttaaatgtggtgtgaggtaggggtccaacttttttattcctttgtagttagttttcctttgtcacatcctagcctctaagacatttgctcctaaatgctgttcagccattcagatcacacccacatccacttaggtttgcaagaacacaaggacttgtcaatgagcctgaatctgcaatccaatatccatgactatggttggtgtatggcagatgccacatgctctcttgtgactgacagcttgatgtcccagaaataactatgacggtgtttggtagttgagcagttggtgggaaaaactgagccatctctctcaaaggcagaccctgtaaggttggactaatgggcagcaaggccaccagctgcagatggcttatatgcaacaacttactgcatcaaccagagtttatacagttgtttgttgtttattccttaagtctagagagagtcgagtggtcagcccctagataaagagttatgagcttctatcatgtagttttctactgaaaaagaactaattaagtctcttcacccaattttgtctacaaaattatgcttctactgagaaaaggaaaggaaagaagacaaatgagcacctgtgttgtgctggcatggatgggaagatgggtcacagagctagtggatgggagcctcttctctcgataaattaaatgagcttctccaggtgtcagaagaattcattacaccccttctttttttttttttgagacagagtcttggtctgtcacccaggctgcagtgcagtgatggatctcagctcactgcaacctctacctcccgcgttcaagtgattctcctgcttcagcctccagagtagctgggaccatagggacctgccaccatgcctggctaatttgggtgtttttttgttttgtttttgttttgttttgttttgtttgagaaagagtcttgctctgtctctcaggctggagtgcagtggcgcgatctcggctcactgcaagctccacctcccaggttcatgccattctcctgcctcagtctcccaagtagctgggactacaggcacctgccaccacacccggctaattttttgtatttttagtagagatggggtttcaccatgttagccaggatggtctcgatctcctgacctcatgatccgcctgctcggtctcccaaagtgctgggattacaggcgtgggccaccacacccaaccaattttgtatttttagtagagacagggtttcaccatgttggccaggctggtcttgaactcctgacctcaggcgatcctcccagctcagcctcccaaagtgctgggattacaggcatgagccaccgcacctggcccacaccccttcatttttaccctctgtgtttcagattttttcaagagtgtgtttgttgtcaggggtatagtagagttggagtgagccaccatttaggacacaagcacacgcttgttgtcaggggtgtagtggagcctctgtttccccatctataaaatgggaccagtcatgcctgccaagcaagggagggtcgagtgttcagagcagtcaagcccattagaggcacgactaataaattccagttgcctttctgcctccgttttgttacgagaaactatgcaaacatgtggaattgatgtttttaaaaatttttaaataagttctgtgatctgtggagaattttaaatcatagaaggctggatgtgaaagcaccactgcagggtctaaaagcctctccccagcataaggcaattccagttaactcagaaggttccacagtgtcagcactgaaattagcagagctttgtcacagacctcagtttttaataaatcaatacagagaaaactggtttttcctcatttcttgacaagcaccagcatatggggatttggcgggttttcccagcttggtgccttctgcagcctgagacggtgggggtatctctgagtctccagggctctgtcttccctagactgcagtttctttttagaaacatggaatagtggtgggctttgttttctgcgaagctggatggcttaattactgtttactccccccacagctcttattttacaacaacctgggattttctccagactttgttttgtgcattctaagcatttccacctcatctctcataaacacacaggtcttgtgctctgttatcaggagctgtttcttttatgtgtttttccttgctcagttttatgaccaggctggtcacgactggaataaatcattaaaagcactcgaccttgatccacctttgtgcaagagcatttcttgtaaataaactgattctttgttttctagttaaaaaaaaatcatctgcaccttggaaaaattaaaatgcaattattggaaggctccttgcttcactgttccactagcattgcacgttacctaattagagtggaaagtcagggctgccttctccgagtgctgagtgtggctgaggccaggggggatgtgtttgtgtggcatttgaggtctgccggttctgcatcagagcccgtggtgggcacactcaggacaggaagctcagcacatctggccttattatgtctcccttccccctcaccaggcaacttctccagggcgtgcagatctgattgtttctaattgattcattgacccagaggggctgcagccagggctgggcgggcactgctgggtgtgtgtctgagcgtgtgcgtgcacccacgtgggccgcgtgcacataccatcagggctgtgtagcagtattccatctactcactggtagacttgtaaaagcaacccacaaaacatttttaaacaaaacccagaataatgaccttgaaggcaccgagaaaccacatcacatcctttctggttgtcgtgttgttttttttaatagtctgcattgctgggttgtgacatccacgtggccacaaaaccatcttgaggcaaaataacatttaatttgttctttatttatttttaactaagcacattgcatgtttccaaataaaaatagacccacaatgaggtacctgggcccagtgtgtgaaacatgagccctggagccgcacctctgcggagccaggccatgtgagcttcctctgcgccttttggagcggatgaggaaggaggatgtattagtctgttttcatgctgctataaagatactacctgagactgggtagtttataaaggaaagaggtttaattgactctcagttctgcatggctggggaggcctcaggaaacttataatcatggctgaaggggaaagggaagcagacaccttcttcacagtgcagcaggagagaggggggaggggaagaactaccaaacactcctaaaaccatcagctctcatgagaactaactcactgtcccaagaacggcgtgggggaaactgttcccatgatccaatcacttcccacccggtccctccctgacacatggggattacaatttgagatgagatttgggtggggacacagagccacaccacatcagagggaccaccctgtgtatggctgaactctgcaccagtttgatttggacatcagcaaagaggatgttggtttagctctttgggggcaggaaggaggggtcatttttaatgaaatggttcccctgtcccattctctcctgccctctgccaactccttccctcctgagacacctcaggcaagttcatggaaggagcccttggaaaggagcaatgtgcagctcgacagagggacagccatgggggagagcaggtgcagctcgacagagggacagcccatggagagcaggtgcagttcgacagagggacagcccatgggggagagcaggtgcagctcgacagagggacagcccatgggggagagcaagtgctccttcctggtggccacagcccatccagggcatggagttgacgggcagagtccagctgtatttagccgtcatccgccccatggcgctatgccagcagagccactgcccaccaacccccaatgtgactgcacagccaggggagcactgagctcctatagccaccccatgccaccatccgcttgcgtgtcacacaggggcatatcgaggaactgccttcggggttaaacgcccacgggagggcggatgtcaggtttcctagcgagccctgttgagataagccctgtggtccctgcggggcgagacatgtctttcctgggtgcggggagtactgtggtggggagccctggagagtcagcccccagaagtgcggccggcatgggctcgccctccccacccctgctgtggctgccctcccagcattccccagaggggccggcacccaagggctccatgtcatcctatgcgtccctctgccaaagccacattcttcccctggaaaacacctgcccctcctgcagtggctggcctgccgtcccaccaacaccacccatccttgggatgcggcctccactgccctgcattgcgtttctcctggtgtgtgtggttcaggtttcctgtgttagggtgagatccttaggtgcgagcatgtgtgtgtggagacacacgtttggcttgtgggctggtgctcactgaggacttcaagaccctggctctcccagcgctggctccgcttcctctgggtcttcctctctcaagggctcctgaagcatttttcagaacattctgtgcagccttccggggcgtgctgtccacgagacccagcacagaccccggctcacgcccgggatgcgcattgtgaggaggcgctccctctcagggtgtgcgggtgcaggggcatcgcctgaggggagtcagggcctcttaaaccttgcaccctcggtgtcttacctggctggctcacctggtcccagccctaggcgctgaagttagacagatctggcgtaggatcgcagcatggagtgcccatccaggtgaccttgggagagttacctttcctttccaaacctcagtttccctcatcctgggtcacggggattaagttaggtgctatgggtactctactcagcacacccccgacgcgtattagatgcctgatggatgcttgcggtggttattgttttattgggtgaacacaaaagcatcatacacaaacccttcccaggtgggctgaggctcatagtcaccattgttgccgtgtgcctgccttgattgtgcatgacgttgaccgtgcggacttgcccggtgagaccagggcctcccacgttctgaagaggatgtgttttgtgtctctgctgcaggaattgcttacttaggaggtgtgtgcagtgctaagaggaagtgtgtgcttgccgaagacaatggtctcaatttggcctttaccatcgcccatgagctgggccacaagtaagtatcagactctgtgtcgtcctgttttctttcagtcctttttgagtgcagatttttcacttgaattctgtaagttctaaaacagtgctgctctatgcctttgctgcatctgcaataaaggacccaggtcagtacactagggtccaaaccctcagagaccccacgagatgactgcaccgattggcttggagagttgaaatgttaatttgatgtgcacatctattcttaaagccaacagactagaaagaagaggttcctctcaggatgtccttatttaattgtacttcctttccgggacgagcatgatctttgattcactctaagtctattattcacataatgggatgcatctttatactgttgactttccatgtctttttctgccaattctaaagtccaactttctgattgtagaatttagtgtcttagttttgaagaattaacagctgtggatgagagtctttgcacacagcgattcttctctttaggatgaaataaccatagaaccttagagcttgccttaaggagagtccgaggcaacctcctggttgttcagatgaggaaacagagcgtcagaggggttgttgagtggctggccccaggttgtgaccatctgtaggaagcctcaagcggcagaaagccagacgacgctcaaactgtggcctgagggttgttctttttcctagagtaggtgtctgttttatgtttctctgaaggaaagattgtgatatgactgcttaagagcttaaaagaaaattaaattgaggaggccagagcatgccaaacagtggaaaggtttatattggattgaatagaacataagtaaatggaaatctagttcttgggggaaaaattattgtaaaggtttcctaatgacctacacagtaagatgcctggaatctcaagtgttaactctagtttttacgagagtaaagtcagtgtttaagaaggagtataaaagcaattgtttttctcaagcatttgccatatctgtggctttactttttgtttgtttgtttttttatgagtgatgccttttaatgagtttatattctattaattcactttttaaaatgctggtccatatccactgaattgattttatgacctttttgttttgtttttgctgttttttgtttttaattctactctaagttctgggatacatgtgcagaatgtgcaggtttgttacataggtatatacgtgccatggtggtttgctgcacccatcaacctgtcgcctacattaggtatttctcctaatgctgtccttcccctagtcctccatcccctaacaggccctggtgtgtggtattccctccctgtgtccatgtgttctcattgttcaactcccacttatgagtgagaacatgcggtgtttggttttctgttcctgggttagtttgctgaggatgatggtttccagcttcatccatgtccctgcaaaggacatgaactcatccatttttatggctgcatgtttttgttgttgttttggtttatctagcgccattttaatttcttccattcctgtagaggggtttggtagttggcctttccgtacctattgtatgtcatgatgtgagtaggtacagagagtggaaatgatgttatgtgcaattcctggggtagggaggaaatcccatgatactgacccaggacctggtgaagcaagatgagaagttgtctctgagtgcacagttatctcatctcaacactatttttaaaaatactggcgacaattctttgcacagaactgttttttaaatgaagttcaattgcatttgtattaatacctctgagttcttaaaatcctgtatccaagagtgatttgctggggaaaaaaagcataaatcagaatgggtttggcaaacatcttcccaccatcaagggacccaaccagcatgccgtagtacctaagaatcaattacctaatgattatgagaatgcaggatgtcagagtacttaccaacacccgagttgctatgggcctttgaatagtcaatttaaataaggtgggttgagctatagttacatgaactgcaatgtcccacgccagcatccagcagcatggcacatgctaagtgccatttgcacatacgtgtgggcgcacacatgccgcatggaggtcttttctcatcagacattaaaaatacagagggccattttctccctgatgacctgttcgagtgtgccggatcaaacactggcctccctgcagcggaggtctgcaaagatgaatggttagattcaaacacactttagtaccctttagctatagactgtgtagaatttcttggaggactctttatagcttgctattgaactccaattaccgacaaaaacaaacaccttattgttaatcaaagccaataaatcttgctagcatttggccctccccctctttgggtaattacaggtttcccagggaagtctttgattagtcgcaagtgttgggaagcagatccctgaggatgaagctatgtcctccccgtcagcaggcccctctggttgctgggctgtggttgcaggctatatgggctgctggaaaaggccaagaccaacctgcactctcagcaaagccaccggccaggctgtttcacagacacgaaaccggaaagctgatccctattttggaatacagtggagccatttaactccatattccttagcttatgtgaagaaagtctccaggtggctcacccaccggtcccttaccatggaatgctgacaaagtgaaacatttctggagggaaggtatgtgcgtgtgtgcctttgcacacagcacgcaaaggtgtggctctcctgttcgttacctaatgtgcgtcgtagggcgattggtgtaagcagctaccctaaaatctgattgtcaggaaaaaaattccacttctgtgtgagctgtacgttccacttatcaaacaatgagttgcacagattcacatgattttgttgctgcattggctgtcagaaaacacaaagctagatttagggcttattttcagcaattaactcatctacatcctggaattatactttcctccctcttctctttctagtgtctctttgtatgcatggctttattttaaatcaaacataatttatttggtacaataaactggctctaatccaatttgcagtcaaataggtcctaagttgtaattaaacttaaagttcttgccatggtaatgtcaatactgctgcttcagccatgaattaataacatactagtgatgtttaactcaggtcagagctcttgtttattgaacacctactatgtgcagggtactgtgtgagatgctgtgtgtttatcacgccattgagtcagtcctatgaggtaggcattatataggttttactttacaggttaggaaactagtattgcttttttaaaaatttatagttactacttaatatgatttgggatcacttatatgattatacatgctgcaataggcccattaaaataaggatacaaattacatgaaataaataataagagaacttgtagagtcaaaaaccaaggtactttcagtttaagggaagtaaatgtccatgtgtatagctgctgctggctgaccaaggacaatgaccgtatcatggagaggggttccctaggacactcgagtactgtgggtgagattgacagatttttttttttgagatgagattgacagcttctttttttttttttttttttttttgagaccaaacaatgggccagtcatttaattaatgtaagtctgagactattaggatgaaagtgatgccggtgaaaatgtgaaaatgtgaaaatgatcaatagttctgtggtcttacggaaacatggaacaggctccatttacatattaatacataaatgaatctgagattttaaaagcttcttgcccggggccttctcacagatcctgcctctcctatatcatcattaactcccgtgtaaccactgagctgaagctgtggattcattcgattaacagctttctgattctgtgccctgacaaaggagcaggctgcagaagacttcccagccctgctgcggacacgagctgggggatggcaagtcctggtgcaggtgctgtgtgagaagctgcagaggggccacccttgctgctgcctggaggcagagtcagctgctgagcagcggtcacgctaacaacagcctggaggctcctaaatgtacacccgtgcccttggttgtcttcttgcccgtgaaaggctattctgatgggcagccatgtgctacctttgggttcagctagtaattagaaatgttggcagcgttgagtgtgaggaaggcagctgtgtccctttccatagcggtagcttgagaaatgcaccgtaaagtgagtgtttttagccggggtctccttttgcctttctccatcctgcggtggccgttagaaagcagcagcccctgcacatgggaagatggctacaacaggcatcttttacccgctgatccttgctaagacaggaaccatggaatggggggcagttccttgagagaaactgcccagctgggatgacacgccccagggttttctccttcaagaaaccaggacagcgtgccttgtcctggatgtcagcatccaacatgccgatcacaatttggttttaaagagaaagaggaaaatccagaagtaagcatttgtttctctcagataggcccctgcttttcaggctcaactctggttggtcctaggaaggactgacccctgatgatgagtagaagctcagctctatgctgactgcccgtgagaaaaagcaaaaataaaacccagatcaaggaggcagttggcagtaactttagtgtgactttaaggtgggtgtaatgcagctgtttggattgtagcatctattgttggctgtgatttggaagctccggtataaaagaaagtgcatagctctgtgaaggctgctgagtgccttgtgtttcgagggaagtgtgtctggtatgctgcagctaggtccaggggaggtgcctggtaggaggagctggtcctagtgcagctgctggcaggagggcacagaaccaagtgtccactagtcgttctgggcctagggaaacccaggaccctgtgcccacctgtgtctcaatcaggtaaggcagcaaactcctgggagatgtctagagacaggaccttctaggtggggtgacagtggaagggagggagtctgctttgtgaactatccgccacccactcagaaaaacgaagaggatatatctttatacagagaaataaaaaggtttctcattgcagaaaataaacctctgcctttgttggagtgaggagtgtctgttagataagcctgagccagaccagggttcaagaaatgcctggccctgggagccggcccaaaccacgggaggtctccagcccaagtggcaccagcgccacgcacgtgctcagcctcctgcagcctctcctcgggaaggagcttctccagacctgcccctcctcgggtttcccctgccgtccctgcacccttgcttcggtcaaaaaaccattctctttccattctggagttgacctctcctgtagtggggaggctcagcccgtggcctctggaaaacactgtcttgacacaagctgggagcttggcgtagatggtgcctggcagtgacgcgcagcaggagcactgggcgtttagaaatgcagtggcccagcgtcacccactgttgaccgatgcgctcactctcggggaggaagctcaggaaagctctccaggagattccgcacatcccaggtggagaaccgcggaagacgcaacattggaggtgtctcgttgttgctctttctggccttgcccacattcctgccaccatctctttccgccatgcctccaaggccccagtgctggggagccaacactgggtctcccccagtgctgagcccggctgtgctgaaaataacccacccacttcacctctctctcggtcaccctgagttccatgcacctcaccacttctgagtgagcgctcaggacccagctattctgaatgttgctagcatagacaggcttagtcctctctctactccgtcagctcccgggagacctcaaggaggacatggcgcaaagcgtaaagtgacctgtggtggagccactggaataatgggccgggcagaagcctggacccagaagaggcaggagagcgagcagcagagggacaggtggagccctgcaaggccagagggcaggtggggctgccaccaggtgcaggtgaagctcagtcttctctaattttcattacattggatgcttccagccagatgtgatgctgtgccaaggtgagtttgggacagtggacgtcgggaaggatgccacattgactaggcacgtgcttgcctggcctgcagctcagaacgtgaaggaatctgatccctgcaaagtgtggcccatgggcagtgggtggacacatgtctgggggagtgatggggaggagggaaggttgggggagagccatgtgggggaaatgttcccataactggagttgacatggttcaaatgaaaagaaattgtctcagtcccagaacaggaaggaaagcaagccattatccagatgtgtgaagcatggaaatgcttgtctgtgatttgtattaagaacgagccagccggcacagtgctgtggggacacggaatggacccaggacagatctaggcaagcaggcaacccaccagcagacagtcatgggtggtggctgctcttgcctcaaatgtttggcctgagtgctccacctagtaggcacagcacagacatcagatgggccggcattgaaaggaaggtatgcagagagagaatttctgagaatgtcataactgtttagaaatcctggagggagagggagcattcttttgttctagctgggattagggcagttgtgttcacataggggttggccttcctggaggaacagaaaagggggtgcctccccccaggaagggatggagccttggacaggctccagacaggtttcccagcaggttcctgcctgggcctcatccccagttcctgcttagcaatcatggcctcaggcagtcttcccttctctactgaagggtaattggttggtggtgcttgaagcattgaagggttctcacgtttccctcagcggagcttggagtgattcctgaatacgtttcctctgcacttggcccctgcatcaaagtccgtgtgtgagcgtccactgggcacggcagtcttacccaaattccagagttgttcaaaacgtgcaggccttatttccttttatttatgtatttatatttatttttaatttttatgggtatatagtaggtatatatatttataggttacatgagatactttgatacaggcatgcaatgcgtaagtcacatcagggtgttttgctggtgagacttgcagggttcttcaccttgacaagccacaaacctcctggtgccttggctgtgatagaatgagcttgcgactgtggaggacccacggggcagctgttgctctgccccactcagcattgcctgatttcttgcttcctcccctctccctttctctcacacaaataaaagcagaatttccttctggcccctccccagcagagaatcttggatgggaggtgcccccgcagtgaccagagcagcaaggagcatttgtgactgtgggctctgtctaaatggccctactgctgtctgcagcaattctcacagtcctgcattcacgggttgcagagaaactgcattgctcttccttggagtctcatcattgatgtggagtctcatgcgaggcgacgacatttcttccagttgtctggaaaacccagagcctctgttccaaagaggatctcagccacagccttcccaaatcccaccaggccaggcctgatgcctggcttggagggagggaaactcaaacagaaagccattaaaagcctgtcagcaagcaggcacatgcagtcctacctgtattctgagcagcatgtccaaacagctgttggctggagctcagcgtcacggtaggaagtccagccgtggagaggcttcctctgcccccagagtttcgttactgaataaggcaggttacacacgctgtgctgatgtttgtctctgccccaggaatcctttgcatttaattatcaggtagattcccttgcctaaaataatgtcatccaaggtggtgtttgaggaggcaggagggaagttgagtttggctaaataaccagattctgaaatcccctcagaacttccagactcttccagcagttagctgagatgtagttttcttgtgtcagagcttctggcagcctcaactgagtggttcttggagctggaagggatgtccagagtcgacattttgcagacggtgagccacctcccttcccacggcgctatgtggcccagtggagactcggaccagaagctcaggccacagcacagtgctctttccacacgtgaacagaaccagggccagcgctgagccctgtccaggtggctctcttggtaactggactcacttcacctttacttgaaaagacacctttggcttacacagctagggtttccttcgtgctcaggtggcaggggtgtgatctgatgcagctttctctgcagaaggagtgtccccattcttccaggtgtttggtttcctgcctgaaacccttgtgcacctactgcccactgccagtggacaacttgaaaccaagtacctgacttctccagacctgcccctcttggggttcctcctgctgtccctgtgcccttgctccggtcaaccattctcttctcattctggaaatgacctctcctgtagtggacaggcccaacctgtggcctctggaaaacccaacctgtggcctctggaagaaacctgaatgcctttggggaccttgccaccagcccactcaatggcacgttctgggaaagggcgcttctcatctccatctgtttgaggtcacagatggcttgctctcactttgtgcgaaggtggtagttttgccaaatggcagtggcagacagagagggccagcagaagggctggggggtctgggagagccacggaatcatgcactttgttcctgacatcagagcagagcacagatggtggtttccaggagccagcatgaggatctgggaatggcctttcttggaaaaaaatatacatcagtagatggatgtagaatgagggaggttatcattttcttagcgagtcgctggaagcatgagtagggcatcctcttgttaagcagagcctcacttctgcagtgttgagagggcctctgctaagtaagcctcagtgactcacacctcacttgtgattggtatcagcagccaatgagaggaaggcaggctggtcagcgttgaactgagctggggaagagtcttagggtttccaaggccccggtgatgctgatgcaggcaactgaggcaggcaaccactgggagaagctgggccctgtggtgctgggtgtatcatgtcagggcctgaacttgtgcccacaccttggccacggctttcccagattgcattcgggtggattgctaaagagaaagacagggcatccacagtggtagtttttagaagtcaaacttggtaatactatcgccataccaaggacatagcagatccaggaggacgcctgccgtgaggcagcttcagacactgaagacaagtgacaagacgcctgctgacgacccaaaggcatgcatgggttggtttctggtcaggggagccttcagcaggagcacatgttcctgttattccttccatacagaggcatgtgctgctttggtaaatgacacctagtgagtctgtggttggctgtgttggtggctctgcatctggggagcacctgaattaataaagggcctgtgaagctttgtggcacatgctctgtgatgacccagggatgtcagaaactgctcccagcagcaggaggagagttataaagaaaaaggcagccaacttcctgccagctgcttggtccacactcggcttactcagcagaacaagctcgcaaagccccgctccatataccgtcccccagttgagctgtcctttctgatttaacaattttcacctaaaactcctacatcccatgcctagttcagaatctggcagagggaagaagccccacatttggtgctgcacacagtggagaggcaccctaggacttcaactcgtgccttgcacttcacagtgtagtcttggaccagcagcgtctgcatcaccctggagactgttggttggaaatgcagggctcaggcctgccaggggactcgtgtagaacatgatagtttgagacaactatagctaaggacatccaaggggtggaccttttggtttaactcattcctcagtccgatgctcagtgttgcagctgcaggtatatataacttggtgggttaaagcaaaagacttttttttccatcttgtttctgcgggggtgttttcgggatagctttcataccctggctttggaatctcttctctggtccctgctctttggccatgctttgtttgctgcctgtgcagtgctagaaggctttcagggattgtcagctggctttggaatttgacgctaggtttccgttcagcctcctctatcacctggagacaggtttcttagcaggtgtgcttggtacagccaccactgatcctacctgtcaaagagacctcactctagtccagacatgtgacttgacacattataaaacctggtacatttttggctaaacttgagcacatcaaactcttggatatttacaaacttgtatggaaacatgctggtcaacttgaattggggtttcccgtgaaatgggggttttccacgtagaatatggaaggaagccgcaaaactgtcagaaacactgaagaagaatgtcagactctccctaaaaattcccaaagcacctggttttgtgtgtgtgttcttgtttttttttttttaagagacagggcttcgtggccgggcgtggtagctcatgcctaaaatcccagcatttcgggaggctgaggcgggcagatcacctgaggtcaggagtttgagaccagcctgaccaacatggagaaaccccgtctctactaaaaaatacaaaattagctgggcatggtggtgcatgcctgtaattccagctacttgggaggctgaggcaggagaatcccttaaacccgggaggtggaggttacagtgagccgaaatcacgccattgcattccagcctgggcaacaagagtgaaactccacctcaaacaaaaaaaaaagaggacctcgctctgtcacccaggctggaatgcagtggtgtgatcgcaactcattgcagcctcaaacccctggactcaagtgcccctcccaccttagcctcctacgttgcttggactacagtcgcacaccatcccgcctggttattgctgctctttgacttgccaaaaaaggcagactatgggtccctgtctgtgaaatgctgactttgctctcttgcctttttttggtctcccattcagtttttattttcagtttgggggcagaagccgagatgtgagcgactgtgcttttcctagagggtgtcttcttcccaccctcactgccagggaccatgtgtgaagagctggtcccgtggctgcccttttggtgaaatagggagttggcaggtcagcctgttggggtgtcttgagtcaggtatgaaaagcatcattttctgtttccacatttgttatattattacccatggcctggaagaccagagcaacgttcaaatgctgggtggaaacttctggaatctgggggttcagagtaaaccataaagtccaggaaccagatcacttcttgctgcaacatgaatcatatgtccagagaagctggttcacctcttgcgggttgagcctggtacctgcctggcattagtcttcagtggtccttgtgtttatagcaactcctacaaagtgactgtaaagttcatttccttgtgaaaggtggctcaggaaggaaagccaagagggctggttaccaaagggaaagaaagtcgaagagcaccctaaagcaatcatgttttcaaccttagggatttgcaaagggttgtaaagatgcccccatttgaacacagtgggcacgctgacagatactgcctgctctaacgttatcactgggcatgcttatctccgtctcaatggcccagcaagtctcaccttacacaccagggatgtgcagtgcaccttgtaccggtgggagctgaggtcctgggtgatggaggaggtgaggagaggtcaatagttgcttcacatgagtctggctctctcggtccagatgaaaagaacttatttgcaaatgggagtggcagaccacattgataattgtggaagagcaatgaaggaagggaaggaatgccaaagactaaaaataggcagatgccatcttgcaaaagggaaatgagacaaatggcatacatttcaacttacgatattaatattgcttataggaaacattccagaatggctcatcaaacataatttgtgagctctcagaaataaaagcgacaatcctagaagtcagccaaggatcgtgcagagataggggatggaaaattttgctcaggtttctgcaaaactctcagccctcctgatggggaaatatggagaactgtgagctggatactgctgcagttaaaggagtttgtaacagttggataaccttactcaatggatgcttattagtagaggaatgtctacctgagagagttgcttcctgcctgccccgggcgctggaatcactgcttgtttgactgctgtagtcatgacctggctgtggagataggtagtatgctcatcagacattgagatggcgccaagatgggagggaaaagggtatgcggcaattcagagtccatgaagttgttggtcaccttgaaaagtggccaaatgcagcaatgcgtgattgcatttcattttcaccccatcctataatagtagtagtatttgcattttatagagaggaagatgaggcccaggacactccactggtaaatggcagagccaggcttcaagccctttgtcaatgttgaagtccatgcactcgccatgtgccttacagctttccagatggcatttaacatcggctaagtctcagatcaactaatgtacaggatggaggaaatgcagcttaatgacagtatcactgccagcgagtatatctgtccctacttccttcacatacttcattgatgttactcattgatcccaggaccttcccttctccactgaatcgcaactcacaggccttcccaactctaggcggccactgccagtagattagggctggcataagagatgaaacaaactgaccgtcccgtaggtgtggagtaattgtcggctgcactcacacgaccagtgtgttcttgagctgtattaacaccagcctcatcttcggaaatgaagaaggcggtgttagtcctgccaagcccttcaggggttaagtggcaccaggaggcttgtgttcagcgtgggaagtctgttttaagaaggacttcaggagccagaagcacgttcataggcaagggaaggggatgatgaaggaaacggctggaaggactgagtgtctttatgtggacgaggtgtgcaggggatactttggaggatgccagggcatgagggatctctgcgcagcccccgacagcagagctgaactggtgtgctgcaagttacaggaaaagaggttgcaacttagtggaagagggttcttaacattagagttctttagaagcaatgggaagtgttgattttctcacactggcgagtttgcacaaagatgctgccttctggcttaggggttgaagtggagatttttggagtttgaagaggtttgaattgatctctgatctcactttagaccctcatgttcttgattctgtgacatggggtcaacatggggggcaaaagagaccaggatctgagcagtgcacactgtgggttcacaggtgtagtaagacaaaacttaaaacacatgtgtaccctgttgagcagtggtagatctcacaggtttcttctacgagcttgttctcagggctttatgtctgttaattcatcccagctactccatggggtaattcctgtcgttctctccattctacaggtagggaaactgaggcacagggaacttaagcaacttgccatggtcccagagcttgtaagtgatggaatcaggatttgaagtaaggtctcagtgtccacactgctgaccactatgtccatagcctctgccacagactgtagcgctttcagattgctttcattgcactgtccatgttaggcatcctcagggaggaggcaggcgctcttggcccaggaaaatagaatggtcactgaggagcatgtctgaatttggagacagaggagtagacatcagcctgatgtaatagaggagtgattaacaaaagccatggggccgggaggaggagaggtggcgagcccaggccacagtgggacaggaccctatcatacctgccacatacagatcccagagctctggaagggcccccagaagagaggggctgtgacagggggctacgggaagtctgatctggtgatggccacagcagcatgatggacggagggaaggtggtgacagaccagacacaggagcggagttcccaggtggcagcattggtcaggaggcacagaggagagacaacctacgctgggcctctggatctcagaggttctgccaaaatgtgtagccagggtctggtccccaaagaaaaattcctgaaggtagctttgccacacatcatttaccctccatgtgccccagtgtcctcgtctgtataatggggacactgacagcctcagaaaaacgtaaaggtaaccttctctaaatgtaaccagatatcctagagattattcaacaacaacaataaaatgataatgaaagatggaaagaagaaggctcactggccaggggccccagggcttgagaacgacaacatggtgaattctctggattttcttttcctctccccacatacaccgattggggcacctggaggcctgcagcctggagctttccacagtctggagctttccacagtcttagacataaaacccaagaacagtctgctctccctggccaatggactggggagacaaagcccaacagagaccacatggggagcctgagacctgcttcataaacaggacatagtgagctggctactctacctgcagcagcagcaaaccccaggcctactcaacttgtgctccacaaccaggacactggtgggcagctcgatctgctcccagcagcagcagcagcagcaatgaaaccccttgtctccctgctgtctctgtacccagaagcttctctctccctgacccccctataggaggtggctcagcgacacccagtaacacagggaagtgcctttcacccccacagatatcaccagcagcgactgaagaggagcctcaacgataccataaaaacaaagcagattgggataacattgcagggcctctgaaaactaaactgtcattggaattaaagcccacaaaagtaagccagacctacctggcaaacctaaacagtgtgatggcttgctgcaatagcatatttaaacaggatcaagagactcctaatataataaccaaagtattcaggatgtagttgaaaatcactagtcatactaagactaggcaagccacaatttgagaaaaatcagtcagctggcaccagtgacaaatgttggaattgtctaacgacgattataaatcataataatgcttccaaaaattaattataaattttcttgaaacaaaaacaaaatttcatcaaagaaattgaaattttacagaaataaatcaatgaaaattatagaactgaaaaaatataggaacaacaacaaaattctcattggatggaatttagatagagtggagatgacggaataaaatccgtgaacttagatgaatataattcactcaatctgaacagagaaaatacactggaaaaaaaatgagctgggccttagggatctgtggaagatataagcttgtatcaggaatcccagaagcatggtggttcacacctgtaatcccagcactttgggggaggccaaggcaggcagattacttgaggtcaggacttccagaccaacctggtcaacatagaagaaccccgtctttactaaaaatacaaaacttagtcaggttttgtggtgcatgcctgtaatcccagctactcaggaggctgaggctggagaatcacttgaacccaggaggtggaagttgcagtgagctgagatcgtgccaccgcactccagcctgggtgacagtgcgagactctgtctcaaaaaaaaagaaaaagaaaaagaatcccagaagcaaaggataaagattgtggcactggaaaaaatatttgaagaaataaagtccgaaaacatcccaattaagtgaaagacatatgcctgcagattcaagaagctgagtgaatcccaaataggataagctctaagaaattcacactaaggcacatcaaaactaaattccttaaagaaaaaactcttcaaaacaaccagagaccagagggaggagcaagatggccaaataaaacagaagcctccatcagttgtcaccccctgccaccaccccacagtaacaccaaatttaacagctatctacaccaaaagtgccttcataagaatcaaaaatcaagtgagcactcacagtacctagttttaacttcatatcactgaaggaggcattgaagtcggtaggaaagacagtcttgaattgccagtgcaacctcttcccccacccttcaacagcagccacagtgtagcacagagaggtaatctctgtgcttggcggagggatagcacaacgagtgtgagactttgcatttaactcaatgctgccctatcacagtgtgatatggtttggatctgtgtccccacccaaatctcatttcaaattgtaatcgcgtaatccccaagtcttgagggaggaacctggtgggtggtttccccatgctgttcttgcgatagtgagtgctcaccagatctgatcattttataaggggctcgtccgccttcgctcttctctctcttgccaccatgtgaaaaaggtccttgcttcccctttgcctttggccatgattgtaagtttcctgaggtctccccagccatgtgcaactgtgagtccacatgttaaatctctttcctttataaattacccagactcgggtatttctttgtagcagtgtgaaaaatggcctaatgcacagtggaaagcaaaaccgggctgagctcagctgacacccatggatgtcctagctagaagaggaatcacccatcccagtggttggaacttgagttttggcaggcctcgccttcgtgggctaaagtgctctggggttctaaataaacgtgaaaggcagtttgggccacaaggactgaaactgctagttaagtcctagtgctgtgttggacttggagccagtggacttggggggcatgcaacttaattagacactagctgaggtggctaagggagtgcttgtgccacccctctcccaaccccaggctatgctgcttgcagcaacaaaaataactccttcctcctccttcaggagagaagagggaagcgtaaagagaacattgtcttgcatcttgaataccagctcagccacaggaagatagggcaccagccaggttcataaggcccccgttctaggccatatctcccagatgacaattctagacacacacttagccagaaggaaacccattgccttgaagggaagcacccagtcctggcatcattcataacttgctggctaaagagcccctagtcagccctgaataatcagaggtatacccaggtagtatgccatgggccttggcttagactctgagatgtggtggcttcaggtgagacccagcacttttccatctgtggtggctatggtaagagactccttctgcttgagaaaagcagagggaaaagtaaaagggactttgtcttgcaccttaggtaccagcttggccacagtggggtggagcaccaagtgggctcttggggtccccagttccaggcctttgctctggacagcatttctggactgttctgggccagaggggagtccactgccctaaatggtgagtccgatgtctggcagcattcaccacaaactgaagagtgcttgagccttaagtgaaccttgtggtagcctggcagtactccccatgggccttgtgtggtggcggtggccacaggaagaggctcctctgcctgtgaaagaggagggaggagagggcaggactttgtctctagtttgagtgtcagcttagctgcagtagaatagaccaccaggtagatttctaaggttttgactccagtgcctggctcttggacagtgtctctggatccacctggggcctaggggaacttgccgccctgaagggaaggacaagccttgctggctctgccacctgctgattgtagcaccctgggactttgagagaacataggcagtatctaggtagtggttacagcaggccttgggtaatcccatttataatagctacaaataaaatacctaagaattaacttaaccaaagaagtaaaagatctctgtaatgaaaattataaaacactgatgcaagctattgaaggggactcaaaaaaaatggaaagatattcagcgttcatgaattgtaagaataaatactgttaaaacatccatactacccaaagcaatctacagattcagtgcaatccctatcaaaatatcaatgacattcttcacagagatagaaaaaaaatcctaaaatttatatggaaccataaaagacccaaaatagcaaaagctatcctgagcaaaaagaacgaaactggaggaatcacattacctgacttcagattatactgtagagctatagtaaccaaaatggcatgggtattggcatttaaaacagatacacagagcaatggaacagaatggagaacccagaaacaaattcatacatctacagtgaactcatttttgacgaaggtgccaagaacatacgttggggaaaggacagtctcctcaataagtggggctgggaaaactagatatccatatgcagaaaactgaaactagatccctttctcttgcgatgtacaaaaaccaaaatagattaaagacttaaatctaagacctcaaactatgaaactgataaaacagtggggagacactccaggacagtggtctgggcaaagatttcttgagtgataccccacaggaacaggcagccaaaggaaaattggacaaatgggatcacatcaagttaagaagcttctgcacaacaaagaaaacaaccagcaaagtgaagagacaccccacagaatgggagaaaatatttacaaactacccatctgacaagagattaataaccagaatacataaggagctcaaacaactcttaggaaaaaatcttataatctgatttaaaaacgcgcaaaagatctgaatagacatttttcaaaagaagacatacaaatgaaaaagtgttcatcattgatcatcagagaaatgcagatcaaaactaccatgagatatcatctcaccccagttataaaggcttttatccaaaagacaggcaataacaaatgctggcaaggttgtggaaaaaaggcaaccctcatacactggtgggaatgtaaattagtaccaccactatggagaacagtttggaggttcctcaataaactaaaaatagaactatttttgtgatccagcaatctctctgctaggtatatacccaaaagaaaggaagtcagtatatcaaagagatatctgcactcgcatgtttattgtagcactagtcacaatagccaagatttggaagcaaccaaagtgttcatcaacagaggaatggattaaaaaaatatggtacttaccacaatggagtagaaagaatgagatcctgtcacttgcaacaacgtggatggaactggaggtcataataagccaggcacagaaatacgaacttcacatgttctacttatttgttggagctaaaaattaaaacaattgaactcatagagagtagaatgatggttaccagaggctaagacgggtaataggaggctggcagggaagtgaagatagttaatgggtacaaaaactagttagaaggaatgaataagacctagtatttggttccacaacagggctatagttataatttaaatgtacatttttaaataactaaaaaagtatacttggattgttggagatgatgataccccgtttgccctgatataattattagacattgtatgtctgtatcaaaatatctcatgcaccccataaatacatacagctactatgtacccacagaaattaggaaaaaaaaattgggaacaatgtattgcctctaaaggaacagcaatttggatgacgataggtttctcatctgaaatcatagaggccagaatgaagtggcacaaaattttttttaagtgttgaaataattctcaattttcaatcctatatcaaataaaactatccttcaggaatgaagaaaaaatacattctcagaaaaaggaaatctaatagaatttgttgctagtaaacggacccttaaagaatggctgaaataagctctccaaagaaaatggtaggagaagaatatggatccttcaaaacagaatgggtaaaagaacaacagaacaatagtaaaaaacaacagaatgggtaaaagaacaacagaacaatagtaaaagaacaacagaatgggtaaaagtacaactacatattatagagtattcttaacttcgtaaactttttaagtcatattctagctttgaagcataagttataacatttcatgtatgtagacagaacacttaaggcagtgcattatggggagggtatgaggatctaaataaatgtcacatttctctgcttaactcagagtggtgaaatgtcaacaccagttggctgtgatgtgtgtatatggcaatacctagaagaaccactaagagaactatacagagtgatatttttaaaatcatgaataaatcaaaatcaaactctaattgatgttcaagtaacccacaggatgtctagaaaaaagaaacaaaagaaacaaaacaaataataaaatggcacacttaatccctaacatgtcagtaattgctttcaatgatctaaaaaaatacttcagctaaaagacaaacactggcagaatggatttaaaaatgtgacctaactatctgctccctgaaagaaactcatttcaaacataatgacataggtagattgaatgtaaaattttaaaaattgaaaaaatacatcatgaaaacattcattgtgggaaaaaaacaggaatcgctatattaatatcagaaaaagtagacttcagaggaaagaagattgatgactggggcaaagagggacattgtataatgataaaaaggtcaacccaccagaaaagatacaacaacctttaacgtatatgtaccaaaataaagagattcaaaatacatgaaacaaaaactaacctgagagaaaaagtagatgaatccacaattatagctagatgaatccacaattttaaaaggctattttcaaaacctccctctcagcaattgataaaaatattagacagaaaattagcaaggatatagaaccaaacatcaaccaacaggatccgacggacatttatagaacacttcatccaacaacagcaaaatacacattcttttcaagctgtcatggaacattcagcattatagactatatcctgaggcacaaagcaaactgtaacaagtttaaaagaattgagatcgtgtaaggtatattctctgaccttataatggaatcaaactgaaaatcaataacaaaaagacaacaggaaaatctccgaacacttgaaaattaaataacacatttctggataaaccataagagaagaaacttcattggaaataaaaaatacatagaacggaatgaaaatgaaaacccattttatcaaaatttgtgggatatagctagagcagtgctgagagggaatgtatagctgttaagtgcttacattagaaaagacgaaagattgcgaatgaataattgctaagttcctacttcaagaaattagaaaggcacgcgtaaaatggtacagccgctctggaaaagttccttttaaaacttaacgtatggcccagcaattgcactgttgtgcatttatcccagagaattggaaagtcattttcatgcaaaaacttgcacatgaatattcataacaactctattcttcttaatagctcaaaacttgaaactacctaaatgtgctccaatgggtgagcagttaatctgtggtacagtcatatcatgcaataccacctagcaataaaaatgaatgaattatgggcacacacagcaatgtggatgaacctcaaggaaattacaccaaattttaaaaagctagtttcaaaagcatacataatgcatggttccatttatataacatttgtgaaataacagttattgagatggagagcagactagtggtggccagggtttgaaggatagggaggacggtggttatggtcataaaagggtagtcttgtggtgatgatacagttaagtttcttgattgtggtggttacacaaagatacacacgtgatataattgcatagagctctacacatatgaatgaacgcatgtataagtggtttaatcagaacaagttttgtggatcgtacccaatgtcagaatcctgattttgatatactgtagttatccaaaatgttaccattgtgggaggctgggggaagggtgcatgcaacctacctgtgtttttcctttccatagctatacagagaaaagataaaatgccttgagcatctttaaaaaatccagatgtccgggtcacacttcgtaccaattaagtcatgatttctgcaggtgggatttaggcatctgtatttttttttaactccttaggcgactccaacacgtagcctagtttgagaacctgtgctccttaatgtgagcagttgtcataaatgtcatcttcctcctcctcgttaaagcagcactgatagagcccttcctctgtgccatgtactgtttgaagcaccatgcattcatcatcccatctcaccgtcagtaataaccactcttctttcttcactgctgtcgttaggcctcctttcccattggagagtggttggccactgaccggtggttctgaaagcatagaaatgcagaccttcctcattcttttaccatccacctcatgagggagtttgcgcctgtggcctgggcagcagggcctggaagacagatcacggggcaggccatggtctaggggttggtcccctatcttgtttcggctgccaagtttcataatttcattatttcttatgtcctaaaaagaaaagacttggctgccaaaaataaatgtttacatgcctgtgacattgagaatgatgaatctgccttgggactggagggtgtggaagagaggaaagacgtggaatcttgccaagcaacaagcaggcaggctccgttgcactctcgggggcaccgttcacacagacaatgaggtcaccacaagctggagttgacactggtgagatttgaggaagggtgagatttgaggaaggctgagaacgagctggtggtctcctaggactgagaaccaagagacaaaaggggaccagaaagagtacagatgaccaagccacataaattcacctctgaggtcagagtctccatcacgccctggggtgcattccttcacctagaagtcagctgctgttcaggctccctttatgcattaagagttgaaatgttggttttcttttcctaaagaattaggattctcttgaaggccttaacatgggactggggggcatacgacgtttgtagatgcatgagcgctctactgcctcagtccggtgaaatcatgccgacctcctacctgaagcagaaggaaaatccttaggccatgccgggtgaccaaggataaggacagaaggctgttccttggacagctgctgttccagaccaattagtctctgctctgttggttgccaaatttggcactaatttcttccataaacacaagttgaaagcagacatttaaataaaaggcaatatcagagttacttttttaaaaaggcataggaactggaacagctgagtacccttgctttttctgattcttgtttcactccaaatgtgagatcgaatcccttcaaagctgggttgcagtaggctgcgaggggagggtgagttggcgggcaggactgggagatgctggaaggtgggtgcttcttcttttccctgatgctttctgcccagggctgcatattctgggaggcatggaacctgctggtaccaccctttattgacactgggaggcttttttgtatggaacaccttttccttttacatttcagatgagattttgtggaaagagccccttttcctgtcttaacgacccattatcaactacaaagttgctgctagtaaaaatatctactgtcgttcatgcaatcctttcagtgccttgcttgaaaccacattccatcctcctaacatgaacgttgctttgagccaaaatccagagagggtttgaggacaagttgtgtacacagtcattaagacagccaaaagaatatatttttatcctgtgaaatgaatgccggttgagcagcagtgattactgcaagaagctataatttatactaggagaagtgaatatttgtttaaggtaaaaaagtattgctttagaagagcctcaaaagtatatttaaaaagtaaacgaaatactagtaacaatactcccaaagatgaaactgcatggaaatttcaaaaacgagcccttggtgttagaaaaacagtgaatctgtacaatacccaggatacttggtacagagtcgcacaaactagggtttagtaacctagcagcagtgtgattacagttcctgaactttgttccttagaatattccctgtcagggcagactatctagatgaaacattggggccttgtattttagttgtgtccagaatctgccaacactattgccctcctctgtctcacccaaaattgggaatctgagcagaaataacagtgagaatgttgactttaaccaagaaatgattatcctgaatgttgtgttgcctagctaagaagtctgtgaattgttgccattggttatcaactcggcttctccctggactttgtgggaaaaaggagagaagcttaaatgggaccaagagctctgtcacattgtaaagagggggcttgatctgtgttttccagtaaggcaggtaggggactgtgcctggaagatgtgtgaaggtggatctcagctcagagtaggagaaagctgcggctctggtcctgcctgagctattcacagacagcctgtttctagtggtgatgtttggcctcagtggtacactagactcacctgggagtccctgtaaaattcagatgcctggcctgtactccaaagagcctggtttacttggtctgaggtgggcccctgatattggtgtttggtctgaggtgggccgcagatattggtgtgttaaaagtttcccaagtgatgctcacatgcagccagcagtaatagccacagtgggatgcttacagtgtaatcgagacataggctcagtagcttgccacttgcagagtccagtgaataagagagaggtctggcataaagaaagcgactttttattccaaagttcagcttagtggaggaaggacaggcttcctgccttaagggtattgcttcccttttggagcagaaagtgagcacttttaaaaggcaggagaggaggtaagtgagcaggtgggggttggcaagctatcttggtgccttgtctaccaggtggttgacttggggtcctcatgggcagaaatagtttgtgagggtgtccagaaactctagcaggcatactttgggttgtaaatcgactgttctctctcaaggcaacctcctggtggatgagagttctgctctggagcttctaagcacatagatgaacttgccctgtagggagtgtctggtgaagaggaggtaaaagactgtaattgcatttctaaaaagctaagtagggagtgggggaaaagaggaaagagaaaagaaaagaaaaaaaataattaaactatcttagaaaaatggagtactgggttaaaatagtgcaagagttcctcaccagttgtggaccagcagcatcagcgtcacttggaactaaatagaagtgtgaaaatcctcatccatctccccaccccaccccttagaccgcttgggcttagttttcccaagccttccaggagattctaatgtgcacagaagtttgagaagcactcttctacactgcagcaatggctctcaaactttgatagatgttggaaacagaatgcttgttcctttgttagaaatacttgttcctcggtacctcaaggaaaaattagcattcagacaaaaagttttctcagcaaggcaaatttactgtctgcagaaagggtgctcctcgcagttggaacaatggtgagagcacaccagaacaagggaggggtgcgggatcttattcctaatgcaggtagcccctactgctgtgttgttcccgtattggctagggtgggaccgcacagtctaagctaattccgattggctattttaaagagagcaggggtctaagccagagtggtggggtgaatagtttggtgggaaggatggttaggaacaggtaactaaaggtgacttaggtcagagcaggtgactgggatgaatcaggacagaggaggtgaccagaggtgagtcaggatggagcaggtgaccaggatgagtcaggatggggcaggtgaccaggggaacagatgtgaactactgattaaaactggtggaaaattttgtttactgaaactatgaggaagttaaactttaaaatggaggacaaagaactgaacatattaacgtactgattctttgaagaaaaatttagaattcactgcatccaacaatagacatgagaatcacctggaacctctaaaaaaatccacatgcccaggtcatgcctcatcccaatgaaatcagagcctgtgattgagggagccaggcaccagtgttttctagtattctccaggggattccactgtgcagccacacttgggaaccaatgctttgcggaaattgagctggatccttcctggtattaaggttctagactttgcctctgaaattctgtcctgtctccctagtgttaagttacctcaggcagaacatgaatggtctgagagcctggaagggattagtgtctacattgttgctgggggaagtgggtctgcttgcctctgatttcttatgtgcttttcagagagggatgataaggggattctgtgctgactgggtgctctcaggcactcccagccacttaagtaacacaggcagagaggccatagttccacggggttaagaccttttaaaagaagttcttagcagcagagaagctgtttttattttgttgggtccgttggttccattcatttatgaacatttaccagccccttccatgtggtgagcactgagccaggctgccgggaggttctgggccattgaggtgtagagaaacatgaccagtcctgcttttgggggttctccaaagaccttgaaaggccactggggtgctcaggagctcagctggagggatgctgtctgctggcgaggactggggctgctgcaggaaggatgggacctgcaagctgggcccgccagaggacagtggcatccagatgggggcaaaggcatgagcaaaggcactggggtacagggatgttgtgggagcgtgcaggggtcagggtttgtgtcacttgagtgacagctccctcaggcccccctaacctgtgacatgcatttcatagccctgcgaggtgggatggaggaggatgcactcctgcccctgctcccaccccagcctcctgggcagggtggaaaggcagccgtccaaataatgaggccataaagcccctcatggcatttgggtcttaaagaaggaaggaaggaagggggtaaggccattaggagcaggaagcagtctgtccttgcactgtctgctgcccagagcatctgtcccatcggacatccctgggaggtctttgaactttggaggcagcaggctctctcaactgcagcccctcctgcaggtgggctaatcccctcctccaactggcctttgaagggtataggaagtgctgggggctggttcctactgcccattaaaatggcttcccctaggagaaccagtgacagaggctgcccctaaggggggcagcaggcacctaggaagctggtgtgggggatgggctcaattttcatctcacaacccttgatagcctttgaatttctaccatgtacttattttagtgactcaataaagtaacgggtgccaccagccaggccttctcctgctattggctgaggtaaaccctccctgagaaatctgccagtcaaaattgtcagtagaaagcttattcaatctcagcttccaaggaatccaagttgctaagtgtaggtggaattggaaaaatcttgtctagtgcagggatataagcagtttaaaagggaaacaaaagtacttgctgttcttttgtttctttgtgggagaaaaacaggctgatagaaaaccaattgacctagagcatttcctctgaataaacacttttaaaagatgttgttttgagagctgactgtgaggtttaccagaacaaaccaaatttcatcttgaaatccgcgaagggactttcaatggttcccaatttgatgtatcttttcaagtttctgtggctggattatgcaaaggtagaaactttgaggtaggccagaaggctgatttcagcccagcatttaggagtccctgcgtgctgagggactttccgcggctggctgtgaggccgtgggcaggttgcttctctctggacttcagtttccacataggttcagatgagggagctacaaggtccctttaagtctcaaaccctgcagctctttaaggcctgtatctcaactgtgaaaggagttaccattctgcagcagtctcctggcaatatgtttttaatgtacaaaagtttaaggtaactaaaaggggaggacggatgaatgtcacaaagaattcaaagttctctacccccaccccatgccccccgccatcgttcccaagcccatgtggacttggtgcccacgtaacatctcatggtgccagtcacatcacgcttcctcttctagcctcgggtgtatgtgggaaagtcagagggtaggcacaggtaatgtctcggacctgtacttatgataagagactaggaggtgtccgggaagaagggaaccaaccctgaaccccgcctcctgaatgccctggaacactgagtgcccccgggagtggccccggagaacagaggtgtcattgcttcaagctggtccaagattttagctgcttctcaacacctgttctccccaaagccacatccacgctgtgttgcaggcgagtcccagtgccccgtgaccagatgcccccggctttccacctctaaccccaagagggattttcctgctggtttcgagcatgcagttcacagtacctgagggctcccagcctccacgtggccacttccgcacagcttagcaggtgccggttctttgctctcgattgagtgtgggggcaattgcatcctcagtgactgcaccgtgtatggaggttcaatgcatgggctgcccgggctcaagctgtgcttggccagttacctcaggcaagcttcccaacttctcctggcctcagttccctcatctgtgaagtggaataataataattcatgagatgatatatgtaatgagtagtgattttcacattgaaaacagttctctttcccaggtactccccacttggtgggcatgagtgccccttgtagagtattttcctttctctgctctgtcaatattgttcccactctcagcatcccatttagcatctgtgttgaggggtggctccacctttgcctgtacctcaggggcatgttccatgtgcacacacaagtgcttagcgtcatacctggcatgtgttgggcagtggaagctgtgctggtggatggataagagcatgaatggaagaaatttagggtatctgttcaggttctctgaatgccttgggcttcccgaggctctgacctgaatgagtagcaaccttcacagaccaggagtgtatgaatccccacctctaagggaatatgatgaacacagcccacagtggtgatacaccgtcagttttaccgtgcctgcccccaccaccaccgcgctggccaccacgatgcccaacacatctgccattatagtcgcccctccggggaatgtgctaaggcagatgatgttaaaatacaaagcacctggggggcaaggggagggtcctctgaatcagggacatcaacgggagggtaggagcagacagcctgggtgcaggacattgttgcggggctggggatgggaagggaaagaatcacatcccccaacccgcagagcttggggttgcagaccccagaggatgcattgagtggggagatttgccttgaccttctgatgtgcttgccttgtagcactccgcaagaaacagatactgaagacttggagtggctgtagacttccctaaaactgaggaattgctctccacgtacacatgatttttgctacgcactgttagcagcaagttcctcctcgacacctggagggttgactgttagcctggggttttcatcttcaggagcttttagccatctttccatttcctgccctgtcccagccctgtgtctgcagcaccattagatgaattactctctaggctcagaagcagaaagcatattcttattctcaccaaatcgccctgtttccttcaacaaagttccatgataactgacagcgctctgctccagcagtctttccttggcagagccttgggagtacatttctctaaagagaagcactttgtactcttcagctctgctgtgttcttgcttaataagccgtgcacgtggtcttctgatagagccaccctgaaaccaaaatccaggaggtggttcctcccgtcattcgcagtgcacccttggcagaccaggagaggtgaatggagccatgagctgcatcctcggagccctccctgtctgcacacctgcctctaacagatacagtggggcctgaggaaggcccgccgcagacttgaagggggaacaggagtcccagaaagccaacacgtacccgccttgttcgtcctgcggtgtttagagtgggaggtttacacggcttcgccactttctggcaggtcatctgggtttttttgccaggagcatttctgtgtcctgggccagagcaggccccagaagggagagcagctcgggccctgtgacattcatcacgtgcatgggtagtttcaaaagagctcagtgctttcataaatttgtcttcctaagtaaaaattaggttttctgcataaattatcgtcctctaaaaacctaaggagagcctcacaagaccttttcccataattatctcccttgctctgccgcattgaatttcgccatacgcgcttttgtagcagatgaaagcacattctttgactaaattcattagaaactgagaagatcccaggtttaattacactgcatgccatccataggaaggtgcctcgggggtcccccttcctgcttgaggtcacatttgctctccagcatcctgtcactgtccacagcacacagtgcagcccggtggtttctccttcacttggatgcaaagagcttttggttctgactcttcaagtctaagaaatccacagcagccctggaattgggagggttttcacggatgacggcatccgcacgaccatctgggagggtaaactgggtgtaaattaagatcacgtgaagagtcagtacgtgataacaggcaaagggctcccttttctgaatgcccacgctttcagctcctgatgtctacacctggccactaattgttctccagctgtgttatgagattgggttatttctccaagtatctgtgagtaatttgtgggcaaagatatgctatgatgatatccaatgaggtgatatccagggctcccacctcaagttagccaatcaggttctcacttaggcttgtgtggtctgggtgctagcagttagtcacttgtgcctatttaaatttctcttaattaaaaattagttcctcggtcacactagcacatttcaaactcttagtagccacacgtggccagtggccacaatatcaggcagcccacatagagactttcccgtcatcgcagaaagttttattgaacagcactggcctaggctacataccaatagcctgctgatttctctgtgatccccaccaggccatgggcttcctgcagaggctgtgtgtcactcactgctatgggcctggtgctctgcaaaatgcctggtgcaagatggtgcaaaatctactcttgaaagaatgaagaacaactacgccttaaattgtgcccagccttctagatcaagaatcatgaagttattcccttctagattggaaacctttgaatagccacctggttcatgcccctcatctctcagctaggaaaacaagcccaggagtttaggaaccttgcttaacatccccataataattattgtcaggtctttaaccatgatctctttctccttggactattgcactgtagcagcaaggaaggctttacaaatgattatttacaagaaaccttccttaacctcatcagggttacctacctatgagtaatctggagcaaatgtattcagtgtgcaaacattagtagcatttccagtcgatatgggaacagggcaaaggtgcccatgttgtaactgatatttaatattattttagaagtcctgttcaatttcataaggcaagaaataaggaatatagaaaaggatgaagcaaaatgagaattgcctgtatattgtaaaagaatcatctgaaaagccattggaagcagtagatgttcatcatggtattgtatcataagaccaacatgcagcaatctgtagttttcctaagtacaagcaatcattacaatagaataaaaagcagatcttattcacggtttcaaccaaagatatgaaatacccaagaatgatgctaataggaaatgtaagaccgtcatgatgcaaactaaaaacatttgccaaggtcattcaaaaaaagcctggcaaaatgaagaggtgccctatgtcctaagatggcaagactcaaacttctaatgatgtgatttctccccaaagtaatcagtgtattcagtgcaatctcaaattagaatgactttttatagaatttgacaagctaaaatcatagggaagaataaaattctcaaaatacccaaggccattctggaaaaaaaaacaaaaaagagagaaaggaaaaagaattggttcattgcttctactccctctatttgtcctgagggggggcagaggttcttcttaacatcctacagccttttcacctgaactggctttgttccctcatatcacctggggaggctatattcttattccatcattatggcatcattctaaacatcttcacaatttctaactggaatcagctttagcacagcccctcacagtagaatggtttctcaggtcagaaactaacataacttcatgggtttcttttctgtgaaatatttcaaatctttaactcagagtctattcaagtcataaggccgtttgcctgcattggctctagatgcatttttggatgctctaagcagtgaggacattgtgggaaggagaatgggagcctcccaagcaggtgccactcatttgggagcctgtgtcattgcgtgttcatattgggaccatcctatcatgaagccatggcatgcccaggaggcattggggggaggcacgctgtgggtatcctctgtcctatgtgctgatggtgcattacatagacctaggtgctcatatgctgctttcatgtcaagccattgattgatcccagtcctgtgtccagctgtgctctgagagctgatggagtggagaaaggtgagaccagctcactccctaaggactgtctttgtcaagtgggagcaagatcagagtggcaggagctggtgagcccatggaatctattaggaccagaaaacagcatttcacagagatggcaggagcttcagccctatagtccaatgtcccttgagcttttaccaagtccaggctactgcatacactctgaagcaaggaggagtgtgacctgccgcattcaaacctagatctactgttgggagccaaaaagaatgggaggctgtgccctaggccaccatcttcatccccttcctatggagagcaacacatggtatagatgagtggtcattagtgattgtccttcagaggtgtcctgagggcatctgcagtcctggatgggggtagccacttaccaagaacagtgggcctctaagacttaagctttactccaggagtcttaccacagtccctaaaccacatctgctagaacagacgtgttgttctcttagctcattgcagagaaagaacgggaataaaggcgttgaagtggggtgggaacttttcctttccccgccagtccacctgccttatagtatgacttccctccttaggccacagctctctgagagcacctgagttttcagctcgaggggctgcaacttgctttgctcaagcgaatgtgtgtgcttagcagaagcaaggccattcttctccactgtgcctactactgccaggcactttggtggctgttttcgcatgtgaccctgacccctattcccttagagaatgtaaactctgtattctcagtgcctagaacaggatctggcatgcagaaggcgttcaacaaatacttgttgaatgaatgaatgaatgacattcagtattattatccctgtttagtcatagatgaggaaactaaggctcagaggtatgtttctttctcaagaggcagagctgacattttcttctaggttggtctgactgcaaagccagggatgcttctagatgggaaggagtactttgtatcatcctccctggctgctgacaccttctcatcaaagccatcaggacattggaggctggctgggactttgagctggccactgtgtatgcacgtgtccctggagtgcaggggtggaggagggtgtgctgaatacgggagactaagcagctagcgcctggtgcctgatactgttaacttgtctgggaaagatggtttcagagaaagaaggccagctaggagtgcagattctgctcttctgcatgacttgagcaaatcactctactcttacagccttcaaaggtgctcagcaagaataggggagatgatggccgcttctatccctgttacatctggaggctgtgaagacacactggtaaaataagtgaaatgctcagacaaagtggtagtggcccagtgcactgcaccttgacagagcgagagtctaaagtaagggtgaaaggtgaaaatagaatggtccaaatgatctttgaaaacttcctaggagctaccatattcaactgtgtctgtctacatccttcatacccagatttcctgccactgttggaaacagcagccatttcttagagcatcagatagaatttaaacttcactagccaagcgtggtggcgtgcacctgtaatcccagctacttgggaagctgagacaggaggatcacttgaggccaggagtttgaggctgcagtgaactgtgatcatgccactgcactccagcttgggtgatagagtgagaccctgtctattaattaaaattataaaatttagatttcaaatattaagactccacacctcctgcccatgttgtataaaaaaaaatgtggatcatgaagcaccagagtcaccctcagcatggggtggtgcttgcagcaagaaaccccaagagaagggtggatacatggctttatctcacacactctcagggtgtcagtgtgcacaagcaaacacacgcttgctgactggaataggggacagaatctcccgtgcttcattctctctgtctctctttatctgtctcaataagttgaatttttggtaaaagttaaaagcctacttgatgtgaatcttgtaaatgtatggagatgtatgtgtgtatatatgtacgtacgtgtaagtgtaggtatatacctgtcctatatacctatagagaactatatagaactatatagttatatgtatacacatatatatacatatatagttatatatacacatatatatacatatatagttatatatacacatatatacatatatagttatatatacacatatatatacatatatagttatatatatacacaaatatatacatatatagttatatatatacacatatacatatatagttctatatacacatatatatacatatagttatatatatacacagatatataactatatatagttatacacatatatataatgtgtatgtgtgcatatatactgtgtatatgtgcatatgtatatatatgtgtatatgtgcctatatataatgtgtatatgtgcatatatatacacatataatgtgtatatgtgcatatatatacacatataatgtgtatatgtgcatatatatacacatataatgtgtatatgtgcatatatatacacatataatgtgtatatgtgcatatatatacacatataatgtgtatatgtgcatatatatacacatataatgtgtatatgtgcatatatatacacatataatgtgtatatgtgcatatatatacacatataatgtgtatatgtgcatatatatacacatataatgtgtatatgtgcatatatataactatatgtgtatatataactatatagttatatatacacatatatacacatatagatagttatatatataacatatatataactatatagttatatataggtatataggacaggtatatacctacacttacatgtacgtatatatgtctacacaaacccaggcaaggctactttgactgaaggctgtacctgactcatgcaccttacatcaaaatcccatgtatatagattcaagaattgagtacttgcttgtcacttcagtcctctggttagcttagagaggctgtgtgtattgtatgagtgttatccatatttacctgctatgatgttgtctattctagaaaaatacactgaacaccaacactatattggtcattatttatccattggtgattccgaagtttgtactgttttaggatgattcttactgacatggtactatgtgcatttgaagtacagctaaatctatggcgacccccagtctactctggggttcgccttattgctgaatccctgaaagctggtgggctcatttttctgtacaaaacacaaacaaataccttctccgcagtgagaggcttttgatgctattgctgcctatttgttttgttctccgtaaagggggttattgatgatcatggaaattgaccctgttcttctacctgtaaatgagtgcagcctgttatcccctagtggcatttaatcttgtaggtagcatttctgagtagctcaagactgggggcacaatctggtccttggcaagaagtactgactggagaatttcccctctggtgcagagctggcctgttaattattgttatgttgattagcaataacaaatacacatctgcccactatttcttagaaactgccatgggccattccagttactgcaaagtcaataagcatctattgaataggaattgccaggcagtatccccacagggctatgaaagtagggctggagtcagccttccatggagaggctgtgttcacgggagcccaagctcttcatcccactccggggattcattccacagactcagccaagactactttgaggtgaggccggacctgacgcctacacctgacatcaaaatcccaaagcttctgagagacaggtacggtcagagccaggtaaagctgaagcttccagagtggcagaggttccgtctagaacacctactcatgtcctgcgagattcggaagccaggaggggtcgagtgctgtgggaatcctctcagaactcgccgcacggtgtgctttgtgtctcccaaaacaaatacagagcagcatgttattttaagataaaatcaagtcaaggccatgaagttatgactgtgtctgataaagctgggccacgtgagacacaaggcccatctgtgccctcagccccacagtcactgaaagttaaaattactgggcatacttaatgccacacgttttcgttaaatataatgttgccagaaataataaatgccctgggacataaacttaaactaatatgagtttctcagtcaaagtaatctttaatttaaactaaaaatagcctagacagtagttgatgtcagcctcaagtatcaaggctcctcccggtctaatgctggttaatcaaactgtaaagtgatgagccgcttggcatgtaaacattttaaaggagatcaagcgtgatctatattagagacaaactccagaaacccaagaatcccactcggctgattttgctgactggaacattccttggggaagtcctctcggccggcagagtgaaacgctcactggacgtggtgtgcttcggttggccacatccctgtgaggaatatggagttgccaacagcacagccatcttttccaagcgcttttgtaaccatcctgtgtgtctcctcaatcaccaggttctctggccaggagaagaggccctgtgggaagaaggagcccctttcatttgataaccaagttgtctactgagaaagctcatgaaattttcttccataaatgaggagaccatcctcccagggcttgagtctcctcccattgtggttttccaagcaacatccatgtttgaaaaacccttctggtagctgcccaggagatcccagccagggagaatgggagcagcttgtccaagtgcacggttagaatacttaattcatgtgttgatcctccatcgacttgtgccccaggtttgaaaagttctcattacctgaggtgggagatgcctctgatcctggccaaggtagggaaagaggttttagagaatgcctacagggagagttgttttcttaagggacttgaatatttctcaaagtaagataatgctgtatccatttggtgaatgtgcaaattttgtaacgtttgacactgcagctgatgagaccctctttactggggggccattccaggagaaacgggttttctgagtggggtatttgaggggcagtgacccaggcaagtgcaacctctgtgtaagttcccagatgattttccccagaacgcagctcatggttccagaccctgtggcttcctgaaactatgcatgttcttaaagaggcaaaacgttcctttctcttaggcttacattcctgaatgtttcacatcgttgatacaatgaaggccttgcatttgcctcgttgcttccaagtgcaagatcatgttccaagtagagactctagtctgtgactcagactaggactccagggtctgtgagttgtgacccttatgaagagacattgttaatgctgattaagaccatgcctgccaaggctggagatagcaatttgacctggtccacatgcaatggttacaccatgaggtggcagctggagccacttttttcatgagacattttatttctataacctctgtacatttggcggagttcattgaaatccatcaaaactttcagaagacctgctcatttaaaaactctctcaccagttttatttaaagaaagaaaatcaaaccctaagtcaaatttaagatagttgacttttaatgtcctttgctaagcatacttgaaaaaccagtcagttcctttaacagttaacatgaaatagagaaagaaaaagctaccaggtagaagaaaataaaaagctgatttcacctaacataaagtccttaaggttcacccatgttgttgcatatcgcagaatttctttttttaagactgaataatatttcattgtatgtatagactacattttattgatccatctatcagtggctgtttaggttgggttcatatcttggctattgtgaataatgctgtaactgaacgtgggagtgatgtctcttggagattctggtttcaatttttttgcgtaaatattttgaaatagaattgttggatcatgcagtagttttatttttaattttttgaggaacctccatactgtttttttcatagcatctataccattttgcattcttaccaacgccatgcaggggttttaatttctctgcattctcacagacatttgtcatgttttgtattttcatagtaaacatcatgagaggtgtaaggtggtatctcatcagggttttgatttgtgtttctctgatgattagtgacgttgggcatcttttcacgtgcctgctggccatttgtatgtcttctttagagaaacgtcttctcaagtctttagcccatttttaactgggttgttagtttttttgctattgagttgtaggagcttcatatatattttaaaacttaatccgttactttatgctaaatgaaataagctagttgcagaaggaaaaatactgcaggattccacttacataaggcatctaagatagtcaaattcatagaatcaaagagtgggcttgtattgccaggggctggagggaggaggaagggggagctgctcgtcagtaagcatcgagtttcagtggagctcaggagagctgctgaacagcattgcaattgtagtccgcaatactgtattgtaagcttaaaaacttcagagggcagctctcatgtgaagtgtttttaccactgtgaaatacagttaaagaaaatgaacctcaaaaaaagaattcatactgagagtgaaagtaaaaagaatttttttggtgccaaggatgaatatatttttaaaatcttttttatttgtaacaggatttttttaaagctgaatggagattgctttctcatgcacttgtgtataagtaaacattttctgttgctcacccaaaagtaaagtaaaaagctgagtaattgcattgaaaaaatagaactcactttattcaacaaagtgaccattaagcagtggctgacgcctgtaatcccagcactttgggaggccgaggcgggcggatcacaaggtcaagaggttgagaccatcctggccaacatggtgaaaccctgtctctactaaaaatacaaaaattagccaggcgtgctggcgcgtgcctctagtcccagctattcgggaggctgaggcaggagaatagcttgaacgcgggaggcagaggttgcagtgatccgagattctgccactgcactccagcctgggtgactgagcaagactccatctcaggaaaaaaaaaaaaaaagaatatagctaaactgttctcactggccatatttgtctgataatttcttcagtcttcctttaaccctaattggatagatacctgacactgaggcatgaggacgagactgaatctaacgagaggtgacttttgccattctgccaagcagtctgccaccacgccagatcaacacacttgtcatggatatgagttgtccggtatttttttggcactttctttgctattaaacagataattcgttcaataaatatttttaccaaatgctcgctttgcaccagtttctgctgccctgagaaaatagggtgagttggaagagcctgtgggcctccagtcaggagggtctgaggttgatagcagtccagaccacgcgaaaatatggccatctatacctaggtggcgatgcagacactcccttttcagaaatgactctagttggtcacttgagcaattaagcaaaaaattgattcaagtggagaaataacaagacattatatgtaagtgccttagacattttgttttaacttaagctataaaaacattagtttttttcaacaattttgtaatggagagggaaagcctcttctttgaggacgggtgtctgccaattggacttccatgtcaccttctgatatggtttggctgtgtccccacccaaatctcattttgaattgtaatccaatgtgtcgagggagggacccgctgggaggtgattggatcatgagggtggtttcctctgtcctgttcttgtgacagtgagagagttctcacaagatctgatgggtttgtaagcatctggcattttccttgcttgtgcttctctcccctgccaccatttgaagtaggtctttgcttccccttcaccttctgccatgattgtaagtttcctgaggtctccctggcagaactgtgagtcagttaaacctctttcctttaaaaattgcccagtttcaagtgtgaaacactttatagcagtgtgaaaatggactaatacactttcctcacacaaagcatgcctataataagagtttgaatctagtttcttttatatgtgcatgtgtgtgtgtgtgtttgtatacacataaaaaggattgtaaaagacttgtgaagcagccttggagcagatttttatgatttattcatctttcacagttgtcttgcccacacccagttggacagcagtctatcttagctactggctaaatctgttttcatgagaacaacaacttggtgtttgtccccatatttcgttggttaacccaacatgtagccacatgtatgaattgaaataacaagtgtcactgacatcagtaggtttaagaataaatacaatggaagattggtaaggatgccccccctccactgacgggggaagtcacatgtgggtgatcagagagggccccgctagcccaaagttccagaacacatgagcgccaggcagcggatcctccaaaggacatgggtgactttagctgatccaactccacgtgggagttggccaagggagcatctctgtaggcaaaagggtgtgggggtggcctgcaggcatgcagagaagacaggatgggtttcttttggggagacaccaccattaggcaacaagcagggttgctgacggaagatggtcagatatctatgagcaaactaggaaaacatggctctagagcagagtttagaaacctcttttatcattatctgtgtcagtgttcatctcttctcccaagctggcagtgatttgaggtcttttccttgtggtccgttacctggcacttggaaagtgtctaatatttttgaatgaatgaaagtacatgttcttttttgttgtcgttgttccactgagattgttgaaagatggtcatccttatacacgttggggcataagaactctgggtcagcaaactgggcaactggatcttgcgtgctgcatgtcttggctcaccccagtgagggcaagtgtataagctaagatcactgttcagctcacagtgtgatgagccctccaggcctagacaggcatcctggtatgtctcaggtatagctgaatagggaaggtgacaggtgtgatcttgttagatgtgaaagatagaaaagccatactctgtaatgagttggaaggcttagattcagatcattctgtaagtcaaggtctaggatggtacccagtgattcccgttagcacagtgattatctctaaggaacagaaacaccaaaaccatgaacattggaatatttaatgtaagaaaacaagtctagccatcagaagcttaaagtttaagaattatcatgtcacagttaattatcagagttaatatactttgttgatttattgttatttagtgaatgctattagtgtctgtcatttgctcaatttatcttcattcactaagcaaatcctcaccctctatttctgtgaaaacacatgactgtgggtctgctgtgtgagaaccactttcacgttacgtccgtttttgtttttaagacttgatttaccttagcatggtccgctagcaccaggaactggaaatgagaagcttgtagcataagcatccctctctcctccttcttggacagcttgggcatgaaccacgacgatgaccactcatcttgcgctggcaggtcccacatcatgtcaggagagtgggtgaaaggccggaacccaagtgacctctcttggtcctcctgcagccgagatgaccttgaaaacttcctcaagtaagtcctggaattattctataggatgaatgcaatcaaaagtacttccaaaagacaaaagtattggagtctcagcaagtgtgaagtggagaaatgactctcttttgggatttgcatctagcctcaggaggcggtcagcgcagagtgtcctataatggcaaggacatctcccacatgcgcatctgctccagcgatgggcgcacagtgggtgatcattacgtaattgccgatcgactcaaatgtcaacatagtcaccctgtcttgaaaagaaacccatttcattcctctgcagtgttgtgaccgtgtggtcaccttggggcgcccctgggccgctgcggaatggagcatttcctggtgtggagatgaaggccgcttgcctagagagggagtgaatttgctgggggatgaggggtgggtttgctcagcttcctcacctctggggaggggagggctgtgtttatctcactgctactttcttcccagaaggtgtctgcacccttccattctcagatttctgtggaagaatctgccatctgatttcagacctttgtcacagtctgtacctgtggacggtgccggtccctgtcccttagtgtcaagacctcagggttgggtttacagagtgactgtgcaggccctggtcactgagctacttagccgtgtgaattcatgcaccctgggagacagcagtgagtcggcgagtctcacctgcagatggagcttctcagtccagtagcacattcaagtacccgacgaattcaggatgtagtggcaaaggtgccatcctgggtcttttttcatgacgttccttgttcatggggaaattgttcagtggtaaaccagcttaacaatgcactcattacttttaatgtagtctacttcccactgagtatttgataccacagatcttaggaaatgctgtaagccccttgatgttatttcacttcacccagaagggtcatggccacgagatgggttgggtttgtttgtttgtttcttgagatggagtctcactctgtctcccaggctggagtgcagtggtgcgatcttggctcaccacaacctctgtctcccaggttcaagcaattctcctgcctcagcctccccagtagctgggattaccggcacgtgccaccacacccggataatttttgtatttttagtagagatggggtttcgccatgttggccaggctggcctcgaactcctgatccgaggtgatctgcctgcctcggcctcccaaagtgctgggattacaggtgtgagctaccgcgcccggccaagatcaggtgtttttatttgctcatgtacacagcactggtgacaagtagtgtgtgtgagcccagaagtaaaccaggatcagtctgtgtcttgtgttcatgcaactctttccttaagaatcttggcaagtgactgggttttctgccttaaaccatctgcctttagaaattgagaaataaaagcattgtagtaagtaacctcctttagagccagagcctcgcaatccccagttcacttattcatttagttatttatgagtcagagtctcactctctcacccaggctggagtgcagtggcgctatcttggctcactgcaacctcagcctcctgagttcaagtaattctcctgcttcagccttccaattagctgggactacaggtgggactacaaccatgcctggctaatttgtgtgtttttagtagagacaggagtttccccatgttggccagactggtcttgaactcctgacctcaagtgatccacccacctcagcctcccaaagtgctgggattactggtgtgagcccccgagcccggcccccagttcactcttttagagacgcgcctctcactgtgaatgaatgctcccaccccagttgaaatcctgaagtcctcggcgagtgttgccagtggctttcagggatagcgtggtcaagtgagacaccgaggtcccacaagcactcgaaaagaacctgaagagttggaaataagcactttgattttatttaaagtaaagcaagtctaacttgtacttgttctttattcatgatagtttttgctcaaagccatagtctaagaaaatacgataatctcttccaaaatcattttcatcaaagaaagctttcagactccccagtaaaagtccatcagccttgtggatgtcgttcctatgcccctcccgagtctccaggttcttactaccttcagagcgaagattcacatttggccatgtagaaaaagaggaatgcacagcaaaaaagcgcagtctgtgtgtccagtgcctgcgtcctttttccataaggaacgtggaggtgccctcttctcagtgactgaaaactcaaaaaaaaaaagaaaaagaaaacaaaaaaacctaggcagtacatttgcaagtcaacttgcctctcggctgtttcaggtcaaaagtcagcacctgcttgctagtcacggaccccagaagccagcacacagtacgcctcccgcacaagctgccgggcatgcactacagtgccaacgagcagtgccagatcctgtttggcatgaatgccaccttctgcagaaacatggaggtaagcagccgtgggagggctggctcgggacagagcatggatccagccctcccacagcaggtctggcttctgctggaggacatgggcattcacactcagcacaggcacatacacacacaagcacaggtatacatgtatatgcacacacacgtttgcatacagagacatgcataaacacactctcacaggcatttgcacatgtgtaccccatatagccatacacacatacacacctacacatgcagttgcaggcacacatctacacacagtcccccacacgggcacttttgcaggggaatccttcagggttactactgactctggtagcctaacattttaatatggaaacctgaggacactagagacgcaggacactgtcgcctgacttcaaacactgcatggatcaacaagagggttaaaactattaaacatttgagcgtatcaaattgggaaaatttaacaagtaataaattgattatatgataataaccccattaaacagttaccgcttgttgagcaatgcctaagtgtttggtactaacgcttccaacatgtgtgatcccaattagtcttcaccatggctcccgagatcctgtccctggtttacagatgacaacaccaagtcaaagtaagcaaacattgaaaaaggctttgttagtaggtagtagagcgaggatttgaactcaagtctcattcacccctgattgcacacgttttcaccatgatgcaaacagcaaggtctgtgacttggctggttttatgggtgaggggtgccaagaggggcatgtgggtacccagggcagggcagtctccatgcctgtggccatctgtgtagcagacagggaaggccctggccacaggggaaggccaggagcctgtggtccacctggccctggcagtgacggggctaggggagcagaacctgcaccatcctgtggagaaggagggcagaagtaggggaaccagccaggggtatgtggaactcagcagccaggcagcaggtggtcagcctgagggagggctattccagcactggcactcagaagcacacctggtcccaaggaggatgtgtggatggctgggcaggttcctggagcaagcactcgggagcagcaccaaagcacacaggcacatgcaggctgcctccagaatgcggtcccaatgcccattagcccagactcctggagacagatgctgcctcttgagtgcttcctgtctgagtataagttagtttaggaaattgggacacaacctgcagttggagcattgcctgccacctttggggttgctaaaaagggcagctccttaaaaccaggctgttgtctcctactggctgtttccccaaaggacgtttatccacactgtagtgctgcttctgccctgccattcccctggggagcacgcctgcgagggtcccctccagagaccagtgggaagctgtcacccatgtcagcctcccactggatgcctgtacctcctgcccccagcagcagggttgaaggacacctccatggggagatgtgatgagccctaggatgtgatcgtccccagcatcctgcagcggtgcccaaactcaccatcagccactgtgtggcttgagtgttaaggcttatgcacacgcacagtgcctgccaagaggcattctgtctgcctcctcagtccctgcagtgcacggatggcaccgagatgccagtaaagagcaggtttcagggagtcccttgatgtggagacagcatgagattgtgtggttgggataccagggaggatgtcaggcagagaaaagggccccagacactggggctggggaagtgggtagtgcccagctgagccaagggacagagtggtcactctgcccactgtggagtcctccgcagggccagtgagatgtggcgggccaggctgagctggccctacagggcaggattaagtgtggtggaggctgggcagagactgcctgctccatgagagccggagctattttcccttctaggagccaagcacttgcatcccggttggatgaggagggacagagggaggaaggcacttgtactggggactcacagtctcccaggctggactttgtccttgcactgtcacacacaaccctgactgcaaccccaaaggcaagggcttttaaccccattttaacagatgagaatatagaagctaagagagattagaaaacaagccaggctcacccagctggaaaggggtgggctggaaagcgagcccaggggtatctgttactgagggaggaaaggaaagctactgtcattcaaagatagaccccaaagagaggaggcaggggatgtggtattttattttccttcagaatcatattttcatgagaggaattcagttagagggcaacaagcaatgattccctcagctttgtgactcctttctccctagaagctcaaaatccaaatgcatatcaagtgagatcttcccacgtgccttttacattgaagctgaacatttattcctgggctcccaaggaactgcaaaatatgttttcctgtttgcttttgcctcgagagtttcaccagcaataaaataaatgtgttttttcctctccaataactagcagaaaggatttcttaggggagtgatggaatgacagtccccttcatggccaccagcctcagctggtcagtggtgattgtcctgcttgcaaggctagtgacactttctttagaggaatctgactgtggggtagcagtgactgtgcacactggagaaaatgtcacgattgttagaaataaatgcttattcctcagtgccgaaaagaagaactagcactgaaagaattttctcagcaaaagataggaggtgtgactcatggatggagcaatggtgagagcacacctgaacaagggagaggaaggggttcttactcctgactcaggtagcccctactgctgtgttattccccttttggctaggattggaccacacagtcgaagctaattctgattggctatttcaaagagagaaagggtataagccagagtggtgtggtgagcagtttggcaggaaaaaaggtgaggaacagggaactaaaggtgacttaggtcagagcaggtgaccaggggtgactcaggtcaaagcaggtgaccaggatgaatcaggacggagcaggtgaccaggggaacagatgtgaactactgattaaaactggtggaaaaggttgtttatggaaactgcgaggaagttaaactttaaaatggaggacaaagaactgaacatactgacatactgattatttgaactctatccaacacactcacgctcttttggggaagaaaatgcagaagaccagatgcttccctgtgaaccctttgagaaccaaggatttggggcatgctgccctaggcctgggacatgtatcagtcaaatccaggtgaagacagtgccacacttcagggctccaggccctgctgtatcaacagtctgcgccttccctgcttttgtaggactgtgttgtggttgatgttgggtatggcaggagagcgtacatatgctgttatccctcaattcttccctgctaggcagccttcctggtgcaggcgtgtgccgcctcctttcttccttctgggcctcatcctgccctatgctcccctgcacttactctattccagctgtactggttttccttttcttctcggaccccaccagggacacagttgcttcatgctggctgtttcctcctccctgccactcttctcccagttatccacatgactaattccgtcaccttttttgagttctgtttttttttttttaatataagcttctcaatgaggcctaccctgactaccctctttaagatgacaatctggtaccctcccctgcccacctgtgcagcatccacatctcctaattcacaagaaacatgaagaaatctagaaaaatactcaatataatgaaattgtttgaaagtagtgaaaaagagaaaatcttcaaggagccagaggaaaaacagataagttatatacagataaaggtaaaactgacagtacacctctcattagaagcagtgtaagtgaaaggacaacagagaaacattgtaaagtactaaaaaaaaaaaggctgtcagcctacaattctatacccagcaaaaatatctttcaaaattacatgtgaaatgcagtttttctgaaaactgaaaaaaatgtatcaccaagaggcccacattataagaaatattaaaggaaatcttctgcagaaaatgatactaggtggaaatatggatctacacaaagaaatgaagagccctggaagtagtaatttcgtgggcaaatatatgatagatttagatacactcaaagtcttcaaaagatcattgatcatttaaacaactgtgttttatgaaaaacagtaagaatataattgtggtagatctttatgtcctatcctcagcacctatgaatgttactttatatggtgaaaggactttgccagtgtggctaagtatcttgagatggggagattttcttgggttatctgggtggcccagtgtactcaagagtccttactaagaaggaggcaggagatcagggtgagtaataagagatgtagcaatagaagcatgaagtcggagtgatgcaaggaaggggctatgagccaaggaatgcaacagccatgagaagctggaaaaggcgaggaaacctcacagcctcgcagaaggaaccagccctattgacaccttggctttagctcagtgagactgattttggacttctgacatccagaactataagagaattgtgttgttttaagccactaagtttgtagtagcagcaataggaaactaatacagatttgccataggaaactaatacattagtttagggtttttcacatacataaaagtaaaaggtatgacattcgtacaaaggccagaaagggagaaatggaagcacagtcatacgcctcatcatgaggtttcagtcagtatcagctgcatatgtgctggtggtcctgtgagattatgatggaactgcctcatagaggtgtaccatttttaaccttttataccgtatttttataccttttcgatgtttagatacacaaaataccattgtgttacagttgcctacagcaggcagtggtgtagtagtagtagtacagtaccacgctatacaggtttgtggcctaggagcaataggctacaccacagagcctaggtgtgtagtaggttatgccgtctaggtttgtgcactctatgatgtttacacaatgaaaggtctgcctgatggatttctcagaacgtattcccattgttgagtgatgcataactatcagggaatttgccctgatagtcacgtaggttcttttctattttccttaagcatcagctggtttgagaaataaggggacagagtacaaaagagagaaatttttaaagctgggcgtccaggggagacatcacatctcggtaggttccatgatgccccccaagccacaaaaccagcaagtttttattagggattttcaaaaggggagggagtgtgcgaataggtgtgggtcacagacatcaagtacttcagaaggtaatagaatatcacaaggcaagtggaggcagggcgagatcacaggaccacaggaccggggtgaaattaaaatggctaatgaagtttcgggcaccactgtcattgataacatcttatcaggagacagagttttgagagcaaccagtctgaccaaaatttattaggcgggaatttcctcttcctaataagcctgggagcgctatgggagactggggtctatttcacctctgcagtctcgaccataagagacaaccacacccaggggggccatctatagacctatacccccaggcacgtattctctttcccagggatgttccttgctaagaaaaataattcagcgatacttctcccatttgcttttgaaagaagagaaatatggctctgttccgcctggctcaccggcagtcagagtttaaggttatctctcttattccctgaacaattgctgttatcctgttcttttttcaaggtgcccagatttcatatttgttcaaacacacatgctgtacaatttgtgcagttaacacaattatcacagggtcctgagacgacatacatcttcctcagctgacaggattaagagattaaagtaaacacaggcataggaaatcacaagggtattgattggggaggtgataagtgtccatgaaatcttcacaatttatgtttagagattgcagtaaagacaggcataagaaattataaaagtattaatttggggaactaataaatgtccatgaaatcttcacaatccacgttcttctgccatggcttcagccggtccctccatttggggtccctgacttcctgcaacacataactgtatactattatacggtttttatactatatacaaggtggaataatttttgtttttttggagatggagtttcactcttgtcgcccaggctgcagtgcagtagctcgatctcagctcagtgcaacctccacctcccaggttcaagtgattctcctgtctcagcctcccgagtagctgtgattacaggcatgcgccaccacacccagctaatttttgtatttttagtagagatggggttccaccgtgttggctaggctggtcacgaactcctgacctcaagtgatccccctgccttggcctcccaaagtgctgggattacaggtgtgagccactgtacccggcctggaataatcttacataaaggcagaatgtgatgcgttaaagattagaatgtcaacttagtaaagcaaccaataaataacaacagagttttagctaatatgccaagaaagaaaagaaaatgtcttcatatattgcttattcctgtgattaagcacattagaaacagatcatgccaggatggatcataaatgcatattaaccatttatactccattctattaataaacatatacaattctcattacattagggttcttgacatgttcaatttagatgtgtgtcttcgtgaggcaggccccatgaccatcctatatctccagaaaaacagtactaatggtccagttttctcattagcagtcacaccagtggtgtcgtgacatcttaaggtgcctgcagttattgcagagggaactttgatgcaaaattctcagcagtattcttcaaaccaatgttggccttctttaatatgaaaaatactactacttgctagatgctgtaaaacgaaagaaaaatattcatagtcaggagttttaggggtgaagcaattaaaagtctaaaaatttggaggactctgttctcttaaccccattcatatgtaggaattgagaacaccattcatgttcccaagccctaggctcccccaaagaccgttgctaagaactggtaagcccctcactggtgttgctgtgtgcagagcctgagggcagcttagaaaagcacctgagcattaatggggcagcagttttgggggatgtgtgtgtatgtttgtctatcttttatcttaaaattttctagaactttaagtatattatgagacaaaaaatgatgaaatatgacagaggctggacactgccaagggaataaaactgtgagccacaccagtgctgaggagttgaacatttgctttttatttttctgaaatatagagaagtaagaaaagaaactgggtagattatgttttgagaaaaataccatcatgactagtgatgggcagttttcattttgctgctgcctcttctgaaggaaaatagcttgcctgcctcaagatgagcccacactgttccctggcaggagggagaggcctccctggtctcgggggtggcgtttctcatcgacacgcgtgtgttattgtaccaaagcaggactgctcacctcgggtccttggatagatttcaaagaattggtgaaccaggataggaaagagattatacttttcattttcttcaagttctagtggaagttagtattctcttccatactgaatgttgccggtaaaccacaggagtcttagccatacccgtgactgccactgtgattaggaatcacagattttttttttttcgagatggagtcttgctctgtcacccaggctggagagcagtggcacagtctcggctcactgcgatatccgcctcccagattcaagcgattctcctgcgtcagcctcacaagaagctgggattacaggtgccttccaccacgcccggctaatttttgtatttttagtagagacagggttttgccatgttggccaggctggtcagactcctgacctcaggtgatccacccgcctcagcctcccaaagtgctgggactacaggtgtgagccaccacgcccagccacggaatcacagatatttttataccatgtaaattgtggccaacatctcaaaatactgtttagactcttcaccaattcaaaatgatggtggttagtagacccagggccagatcttgttatgtgttgacaaacgcatatattactatattacaaatttagaatgttttatattttgaaaacacttccagtttaattgttttcttggttatcttatgtattttataattatgcattcaccacataccctgagaaggctccatcaggtgcctccagaagcacagaatgaccaggtgctgggtggaattttaaatgtggaccttctttctgactggtcctctctgtatgttcttctgccactcgcaattcatagctgttttaagaccaatcaatttaaacatcatttccctactcaaaggtgtgggtaaataaccttggaagagcatttctgcaattgctttaggagcagtctaggcttcaaatattaaccaggttgctggtttctcaaacatttgcataccggagaactgagaaaaattaaaatacagtccatattaattcttaggactctggaggctcccacactatcaccactgaatgtctgtctgcagaatgctagtattgtaaggctcaaagctgtctatggaaatatgaactagaaaaaaaattggcatcaacaactggcatttgttgcaaaagttattggcaaatacagctgtctcctcttttagccaatggtaatgtgatgtttttaattcaataaagcatttcaagaaagtccaaacataaagttataaacattggatggtaaatatttgttagaaaggggaaataaactttatgcaattagcccaatcagtcttttttatgattacaagtttctcctgtctgtcagcaaagtcactgcaaaagaaagttgctatttaacaacactttcaagctacttaagctcagatattcttccaggtgaagcagagggtgagaaagcccaatgcaggcgctgtcagctgcaaggaagagtgtgtattgctgctagagaaggagcaagaaggggtgcagttagggtcctgtcctgactgtgagatccctgcctcacaaagtcccaccgctttctcacatgagagaggtgttcatctgccccatcaccaccaccctggtcctggaggctttcagttgaaaggtgctgtttaatgaccaccacccctttccctactgcttcccaggaatgcattccaccatcgtggctccaaagcccaggcatggctgccacacagtagtgcttggaagggatgtacactcttcttgttagttgccacgagcatatatgtgcctgtatgtcatagcattcacaaggacccgaggtgtgcatgttatgccgctgtttaagaatgttattgagcacaaagctgtcagccaatcatttcaggaagacaggatctagactggttataggcattggaaggtcttagacaattgtttctacgtaatactccctcctttctcttttctcgttaattgccttttggtacagtgtggagatgctttctagatcacacagtgcctgagaaggactctctagtcaggctgcccagggccccattctgcctctgttcttgaacaggttgcctagtctcactatgtctcagtcttctcatctgcaaaatgggaatataaactctacttatccatcattgtgaagacatgagagttagtagtaactgaattaaagcacttagcatgtagcacacactcaataaatgttaggtagtgtccattctgtgcctccttgtcgcctggagccagagggacaggaggaaacactgtttagctgagatcacatgggcctgtcccttcccatatctttccctgtgctgtcctcaccatccctcccggtactctgggagcctggaacccccagggattgctttcccgtgtccagtacctctacctgggcaaaatcccagtctccaggcttttctcctttctcacgtcctgcagatttacatgggcatctgatggctagagagatgcttggggtgacaaaattctaccttgggacaacaaagtttgttcctctgatgccagttatttttaaacctggtggattgctagagtcctccagagactgttagaagtttctgtgtcttactccagattttctgtcttaaaagtcttcaggaagatgggttttaggtatctgtctttccgtacagcttccctggagattcttccatccagcttagttaggaaactgctcatctaaatgaggtctgtccctttaatgctggtggacctggccagaatgggtggctggcggggtcccggagcctggccttgcccctctcagggctgtacggtagtgcgtggacttgcatgccaggctgaaagctgtcctgcctgtctcagtctccgcttcctgcccagcatctgcagcctctcagagccgttggactttggcagcagatggtcctaattttccagaagtgtttgaaagtttacagtagactgccttttcagagagctctccacaccatgccagttgtgagttgtctttcttgtccctgctgccagctgaagtcctgggccccaccctcacccggcagcccccaaccccagccaggtgacggtctctgtagccctcaggaacatggaaggagtggccctcccaggactcaggaagccttccaggagtggggctggcatgctggcccggggaagacttcacactgcagtagtatgtgtggaaaatttggatgagtcactttttcatccagctcttagcgttgattttctctctcttttggcttgtgttatcagcagcacatttttgagagactttatataagcatctcattcagtatcattttgagttagagccgccctccaaaccctcagcagatgcccagagaggatgaggcaagagaacagcaacatgaccttcacagtccttgacagggacaccaccagttgaagaaaagtggcgaaggctcgtgtacgtgagcaatggtgccatctgagcagctcaaaccttcccgcgttttcacagcgctccagggatgcatgcttgctgctggctcatcatgcagccgctcgaggaactatgcagcaaaacatgctggggatgactcttgacaaaccgtaagcgtagccagtgaggtgacaaatgctagaaccagagagctgtttcattttccttgccatgtgcacggactgtgactttccaccgcaactcaagcactgccgccgggggcgggagtgggagaggaggtcttagtacccccacccctgatttggcctgggcagccgccctttgtgtgtttccaccctgttctagtgcatcacgtgtcgctgaagcccagggacgtgctgcccagcagtgtttccagggagaactctgcaggcggagggaacggcatgtcgctgagcacagagcgccccatctcactgcagatgagaggatggacactcacaccgagaatgcatgattgcaggggaagcgggaagaggaaattggggactgatggagaggtagtgtaaccagtgggaaggagcctgtgttctgggttagaacaggtccacccatttcctcatctgtaaaatgggaacaggaagtgtctgtctcacaaggttgatgtgggtaggaaagagacaaccctgataaagcacttctatgatgtctggacttggtgactgcttagcttgccaggcactggtttacagatgaaagtattcatcccattcatacattccacacgtctttactggatatatatatatatatatatgtatgtatgtgtgtgtgtctgtgtgtgtgtgtgtgtcttggagttagtcaggactagtgtagagttgtcccgtcatttttaaaaaattgtgttattttttaactttttgttgtaagacaattgtaactcttaaaacttacaaaaaatactatatgcctttcagccaacttcctgttatgttaacatcttacacggccaggcacagtggctcatgcctgtaatcccagcactttggggggccaaggcaggaggatcaccagaggttaggggtttgagaccagcctggccaacatggtgaaaccccatctctaccaaaaatacaaaaattagccaggcatggtggcgcatgcctgtagtcccagctacttaggaggctgaggcaggagaatcgcttgaacccaggaggcggaggttgcagtgagctgagattgcaccactgcactccagcctgggtgacagagtgaggctcgatctcaaaaataaaaataaaaaacaaaaataaaaaaatcttacatgcccgtagaaccataatgaaaaccaggaaattaagcttggtacaatactattaggtaaaatacatttagatttcaccagtttttccatcaatgtcctttctgtataccaggatcctatttcacgtttagttgtcatgtctctggtctcctccaataacagttcctcagcctttccttttctttcatgaccttgacgcttttgaagagtaccagtctattagtttgcctttgggtttgtctgatgtgttctcacgactagattgaggttccgcgttattgggaaggataccacagaggtgatgtggtcattatgtctcgttactggtgatgctagccttggtcacctagctaagctgttacctggcaggatactccaccgtaacttactgtttttccttttgttgagtttttctgtagccgtttcccaacctcagcgctattggtgtcttaggctgaataattctttgttgcagggcactgtcttgtacaatagaagatctttagcagtatccttggcctctgccccctatagctcgggggcactccccctggttgtgacaaccaaaaaatgccttcggacattgccaaacatcctctgggtcttttatgtcaatgagtctacatacacttttagtctttcccgagcgatggctttgctcacttacacattcttagaaaatcatttcatctcaggcttatgtacataaaactgagctaagtcgcccctgataatttttttagatttctctacattttggatattttctcctttcttttcttctttgttgtacttttctcccctttttcttgtattgtttaacaaaaggttcatctagtttccccccaaagagccaacccttatatttttcgttggcttttctgtttcgccctttttaatgcccagtctttgaaatttgacaaatgcagagttatataaccaatcaatttgcaaaacaggtccatcgcccaaaataccccccatgcgccttcaagctagtctcttcccctattaccgggaaatcactgataatttttgtccttcttgttttttaaaatgtatattaaagcattttaaatttttttaaaaggcaagttagtagtttgagcccgtgtttaagaggagggggtcacacgagggtgtaatcctaagagacagagatcattgcggccatagtagaacactgcctcccgcccctaagtggagaatgtctttattctacatggcatgtgttctgttccagctgttttcttctcaaatattgtctctgcccaactctttctattctctccttctgggtctgattagacacatacatcagtatttctcacttggttcttcggatctcttaacccatcttttatattccccaccgcctttcctctgcaggctgcattctggataatttcttcaggtctgttttctagtcacagattctctcattcggggctgtcaaaatccattgattttcttcaacaattatatatttcatttttaaatgttatttccagtttcttatattcaacagtgttaatatcttgctgctagcttgtttatgtaatctcatcttctatttctttatagatagttactataaattctgtatctgacaattttattacctaaacaccttgacagtttaaatcttctgtttgttgttgctgctgaccatcactcacattaccatgtttgattatgggtttatactttattggacataaccatggaattctaagatcctaaattgctctctttaggagaacttaaatttgtttcaaccagaacccctttttctgaaaaggggctgcttctagccttttcagaactggtaaacacccttccagattccctggtttaacctgggtgtctcagatagatctcctgaccttgttctatctgagataggccagccccagatgacttctcccaacttcagtgccaactgagatataagagctttcaaaggtaaaatgttaaccacaaagaaaaaatagcacaattgggtggtagaaggaatgaaagggcgggcattggtgttggcagtgaaagggtgggcattggtgttggcagtgaaagggtgggtgttggcagtgaaagggtgggtgttggtagtgaaagggtgggtgttggtgttggcagtgaaagggtggatgttggtagtgaaagggtgggtgttggtgttggcaaccaacgcctgccctttggggaacccacccttgcatgtgctcatcacacattgctatacagtagtgtatatgtataaagacagctgggtatgggttttgtatttgcttcctcgaatatttcctttacttgggggtgagctcagctataagaactatcctttattatggtacccagctgttgtgtactggaagagcagccctgtctgccacaaagtctgctattcgctgaaagcagaaggttcatccatcagtcacccttctctttagggtgcctggcttcctgagcatgatgaatgcatctccacctccaagccccaccctttcactccttccaccacccaattctgttatttttctttgtgcttaacattttacctttggaagttcttatatctcagttttcacattttatctgttatattttactctttccccagctagaaaagataaagacattgatgtacatatagacagcctcccacagctcccaccccagtgcaccttcttcccagccggttcttctctctgtcatttctgccttgtctgggtttccgtcccatgaattctgttctctaactcccattcctacgttggtttcaatcaatactttgatcagtgctcactgctggcccattttctatgggttcttcagtcatttcttagttggccaagggtcgtcctgtggtaacttctccagaaaggatttaactacttgtaagttcaaaaatctttttccattgcctaagtacttgagcaaacgtttagttgatataaatttcctgggccacatgttctgcctttccttgtgtctgtatcagcatcactcactccagtgcctgtagagagaggctgctgcaaagacatctgcacagcccgagctcttttcccattatctgtgctggctacccaaagagtgttctggtgtatctctgaaacccagtgactttatcaggacacgcctctgggctcattattttgcgccattttttcttggggctttgctttgcaatctgagaataagaccttccatcatttcagttgagggtcttgaatttatattcaaatgccctttcttttacatcactttagttctcttctttatgagtcttgtgcttctaacccagctcagactctgtgaccttcacaaacattgacctcctctttggaaaagtggaaaaaatagagaaagccccctcctgcctgcctcccagggctgccatgaggctcaggatgacaggaacctgagcactttgtcatttgcaatgcatgacatgaatgcaggctgttgatctagaaggcatcaaggtgatgacaagcattcgtgtagtcaccgcatctgttcagtagtgaaaatgtatcacaagaatggtgaggacttggcttgggtgcagagagcagtgctggtggccaagcttggatgagacgctgcagtgctaacttctcctttgctgtcattcccgttttcttttttcttaagctgacgacaaaggtagccactatcctgactcccaacactgtggttcaacattgttgttaaactgtatgtaaatgaaatcatacagtattccattgttctaatataccagcattcatctgttctgctcttgatgggcatttgggttgtttccaacatggaactaatgcaagtagtatttcagtgaactttcttgacaatgtctttggtgaacacatacacattttttgcgttatatacttaggattcgaattgctgggtattagaatgtgtgtgtcttcagctttagcaaatactgccaaagttttccaaagctgttgaaccaagttaaaatctcattctcagcatccaaaaggacccattgtgccccattgttcccaatgagcggtgctctccatcttcttcattctacccattctggctgctgtgtcaaggtatctaatctaatggtggttgtaatttcccttccctgatgactaaagaagttgagcaccttttcatatgtttactagccatttaaacattctcttttatgaagtgtctgttcaagacttttgcccatttttctactgggtctttttcttaattgatctataggagttttttgttgttttaaatcatgttttggatacaaacactttgttggttatacacattacaaatctcttatgtattgcaaatatattcttgtgttcttacagttgccttttggtaaacagaagttgttaattttggccaggcgcagtggctcatgcctgtaatcccagcactttgggagactgagacgggtggatcacgaggtcaggagattgagaccatcctggctaacacgctgaaaccccgtctctactaaaaatacaaaaaattagccgggtgtggtggcgggcgcctgtggtcccagctactcggaaggctgaggcaggagaatggcgtgaacctgggaggcggagcttgcagtgagccgagatcacgctactgcactccagcctgggcgacagagcgagactctgtctcaaaaaaaaaaaaaaagttgttaattttaatatggtgtaattcattagttttcttactttatcattagtcctttttgtgttctgtttaagaaatctttgtctaacctcattcttcttttctttgatggttagaaaagtttcatgagaaagccctgtctataaaatccataacgaacagttgacaccaccttcttcctctttctcctgatggagtggtcatttctcctaatcccaaccgctcctgtcccataaattctccccctgggtcagccttgtcttgtgagcacatgtccacacacagacaccacagtctcaaagagctcgcaggtcagagtgcatggaatcaaatgtttgatgaggtgcagttggtctttataggaccagctgtgctgcactggggctctcatctttttaccattcctttgaggggtgaacaatcatgggaacatgcaggcttttctgaagcgcatgtgcagtattccacttgagccatccacttcctaaagggcacagatcagctccgacatacgtgaaaaatgagaaggagctgtgggcttttcttagctctctttaaaagctccctccagctctgccttccttccctttctcttatttttatcccttcaacttctaaaaactgtttgattttagacagcacagttgtgcgtctcttctatgcagatgtttgagattacttggaagagcagacctctaaactgaactcgacaccctttgcaaaccacacggtgaccaccctgcaccagctacaggagctccttgaccttcatcctgctcagtgtgaagcagcaggtccctggccacaccctggagggtgatgtcttcctgctccaacttgggccttttagccatgattgggtttgtcatcctggaatcactgcgtcttcacaagatctttaagtacatctgttctcaattttcagactgtgaggccaggatttgggtgcaagtagtttatctgggaagtgatcccaggaagcactgtgagggggtgagggagagagcagtcaagaaaggtgcaatcctgagtaagtgactgctgtcggcagcggggccatcccccccaggaccctctgagaggcgtgtggaacttgcctcagtatcatctccctgtcccctgggcgggtggggagttaccagctcctgtctcttatggttgaggtcactgtctgcatgtggttccttcagagaggacactggctgtgtctgctttcatgattttgataaattgtctccttctgagcactttgtcgatgcccagatttcctaatgatacagttgggagtctgtgtgtttaaatgccaattcctgttttagtggaattattttaattgtgtatttgtagatgttctggaagttctgtaggtaaaatgctataaaaaattgtgcacagctcagctgagctagaaacaggtgaccgcagggagaacagaaggttgcccctgtaaccctgtcggggtaccagtccttcatggccctttgggctgtcatttcttggcctcacagtggttgcctacccatctggccttgacttcagagttgcctcttccagcaagccctccctgatgaggtttggttagatcctctttctgtgtcccctagacagcccctcactgctgtaaatggaagatgtctgtttgctcatcactcctgggaggcaggggctgctgctcctggccagggctgtgcctctgatatctcctaggccctcggtggttgttggagctgttgaactcaactccgtgagacaagccctcctaggagtagatgcacagaattttgttgagctaaatgagccagttcaagtgatgcactgatattttggacatacagacttatgaccctctggcttccccatacgtttcgaatcccaaatttgaaacagtggttgggccacacctctgaccccagctgtgacctgtgagtgtgggtgttctccacaattatggttccttcccttgtcctgcagcatctaatgtgtgctggactgtggtgcctggtagaaggagacacatcctgcaagaccaagctggaccctcccctggatggcaccgagtgtggggcagacaaggtaacctctgacttcccactgcccccaacaggcagctccacatcttgcaggcaactggcacctcttctgacacacaatctgtactctacttaggagcccctgaaacatcccccaggcggcacagaaatgcccatggaggccactccgggcacagagtggtgcctacatcacctcattcctttttcttataagatacaagtatcatttacttaatatttttgttagattaactcctttcatcatgtaaggaaatttacttaaaaggaacactttcaccagtatatttcaaatggaaaaacaacatcacctgccatacacagtaggctctcgtaaaaataattcagtgagaacagtattatccaattctagctaaatgttgagagaatgagcttgttcctcatgtgcaggagagatggggaggtgttggagagaaggggtgttcgggatctgcagccccaggacctctctccagtcttattgcaagaattgaaagagttgaaaaaggagtaaaggtttgctctgatgccgtgattgggaaccacagaaatcacacctagcacctcagggtatgtgctgtgcactttgagaaattgttttatagggctggccttgagttatcctcagaaagaaccaaggttccctcacgtggagctggctgtgccatcgccaagcagcaaacacaactctcaggttcacaacctcaaccggggcatgccgcctcccagcgagaaacgcactcacgtcaaacaaagtttgcagaagcccaggtctcttcaagagctacgtagattcatcctttttctgggatttagaaaatccccatggagcacatccatctgaaagttgagggcaaaatccaaaccctacagcgatatgagtgtcagtttgagtaagtaaggcatgtctctaaaattagcaaacgtgcaaaccctgaaatagactgtacctttatgtaaatttagcaaatgggtttttggcagcacggcattttggggcctggcgggctggagtgagcagctctgctgagtgcctgggccccgaccctccccgctgtgtttcagtggtgccgcgcgggggagtgcgtgagcaagacgcccatcccggagcatgtggacggagactggagcccgtggggcgcctggagcatgtgcagccgaacatgtgggacgggagcccgcttcaggcagaggaaatgtgacaaccccccgtaagtcccctgaccagccataccccaacgtgccacgattggagtttcccaacagcagctctcgctgcctcacacaaagcagggtctgtctcccgctgagcattagaagatatggaaaatgaaacccagccaaggtccagggtgcagggacctcgtgtgtgtcaaatgacatctcagcttaaattgctctttctgtgaacatggatacagtagagtctggggtgagctgactccctcattccttccctgggcctcagtggaaaggttttcggagacagctgtatgacagtccctccagcctgcccgtggtttagcaagtccagggtcattccacactggctgtctctgatgtgggagcagcctggtggttcatgagtcacagagtgtctgggtgcagctgtcttcctcatcctaatatttgccatgggtcctcctgtaactgttagaaaaaatgtgatttagtttttttctctttggcttctttttattgactctaatgacaccatgacctttcctgttcacctttgtacatttgttccacgaaactcagggatcgattttgggcttgatggtgataattccatcaccagatttttcccttttcttcttgaagtttcccatttcttttttttttttttttcatactttaagttctggggtacatgtgcagaatgtgcaggtttgttccataggtatacacgtgccatggtggtttgctgcacccatcaactcgtcacctacattaggtatttctcctaatgctgtccctccccttgcccctcaaccccctcgacaggccccggtgtgtgatgtttccctctctgtgtccctgtgttctcattgttcagctcccatttctgagtgagaacatacagtgtttggttttctgttcctgtgttagtttgctgagaatgatgtttttcagcttcatccatgtccctgcaaaggacatgaacccatcctttttttatggctgcgtagtattccatggtgtatatgtgccacattttctttatccagtctatcattgatgggcatttgggttggttccaagtctttgctattgtgaatagtgccacaataaacatatggctgcgtgtgtctttatggtagaatgatttataatccttgggtatatactcagtaatgggattgctgggtcaaatgaagcttcccatttcttaccatttcttttaatgatctgttttatgccttgtgtgtcagcagttgcagcacatcaattttgaaaacgagcaagttctaaatagtgactataaagaaatctccacaattaagtcctgttgatggataattagcaaatgcctcttatgtttaaaaatcctgatgcccaggtcataccccagactgatcaaatcacagaacactaagggtggggcccaggaattggatattttatcttcccaggtgactccagcagcagtcaatgttggaacctctggattaaaggaagggttatgctcctagtctggtcagtgacaggagcaccattttcccagcaatgctataagaattggcattatgtattaattatgtcttattaaaacatttccctctagcacccagcagagtgcggggcacataggtgtttagtctgttaggaatgactttttttttttttttttgagatggagcctcactctgtcccccaggctggagtgcggtggcccagtctcggctcactgcaacctccgcctccctgcttcaagtgattctcctgcctcagcctcgcaagtagctgggattacaggagtgcaccacaactcccagctactttttgtatttttagtagagatggggtttcgccatgttgccaggctggtcttgaactcctgacctcatgtgatctgctcacctctgcctcccaaaatgctgggattacaggtgtgagccaccatgcccaatccaggaatgacttcttaattaagggcataggtgggtagatgattagaaaccctgtttagctaaatggtgggaaattaataggtggttgcagtttttgcattactctgtgttgacgttaatagtttgacctctggcctcgtgaagaaagggctgggtttggagtcatggcattgggcctgaccctgttggttaatggtcatgtgacctcacgactcttctgttccctggccttagttctgcccactagagggagcggacatggtagagtgggaagagccaggcttcaaagccaggacagacaaatcttcaaatcccagcatgacaacttttttttttttttgagacggagtttcgctcttgttgcccaggctgtagtgcaatggcgcgatctcggctcatcacagcctccacctcccaggttcaagcgattctcctgcctcagcctcccgagtagctgggattatagccatgcaccaccacactcggctaattttgtaattttagtagagatggggtttctccatgttggtcaggctggtctcaaactcctgacctgaggtgatctgcccaccttgtcctcccaaagtgctgggattacaggtgtgagccactgtgcctggctgccagcatgacttcttatagcgccgacggctggtacttgtcttttcatctgaaacttggaagaattcatgggaatgcacagaaagtccttggtgtgtatttaataagcagcccctcttgttattagcactcacagaagaacgaggatggtaccagttgcccttccctgtctaaggctttgttaagtgcagagagaaattggcagggattgtggttgtcatgggtgctccacgtttgtgattggagtttgtgggtcctagtggaagactggtcttcttggcacgttacgtgtcttatctcataacaggtgacacccagtaaacatcatagcaggaggatatcagaacctctgaatgtctgaaggagccagtgtcctgagactgtcaacatttaagttgtctctaggcgagggcaacatttgcaagaataagacgttatcaacgctatgcaaatgccataggtgcctctttgaagggaactggtgttgtctgccttctcgggatgacattagctagggcttccctggcattggtagcccaaagacaaggctttccagagctttttgccttcatgtcttggcaggaaccctgtcaccatctgaactgcttcctgccctgcccacccatggttgctctgggataccacaggggcattttgctctggggggatcctaaacaccacccagttcagacagcggcattagtgtactctcgtactctcgctggcctggcctgccatggggtttcttatattgggattctcaccccattcccccaggtcccatggccccaggagagaggctgttctgtaaatcacaaagttgtgaaaatctttcactcttcttcttcatcaggtcctccctctccctcgccatgatagtcgtggctgttctctcccttgctttttcctgtattttatcattgaggaatgggagaatttgcagggcctcggtacacagacagctgagggtttgtgggtctcagcacgtcggattgttagtcattgatgcatcttcacgtccaatctctgttgtccagcagcatcgtcctgtggggcagggcgatggcagaaggaacagaaagagcctgcagcattcccactcctcccagccgcaggccccttcctgatgaagcctttccaacatgaagccttcagtaaaccttgccagggcctgaactctgctagctgtgggcctgcagtgagaagcaaacacagataaaatccctgcctacccacaagggatgcagtcccaccagctcccctttgttctctcacagacacttcaaacaggaccctttctaaactgggacctctactcctagcccacatctcccctctcagtaaatagcaccaccatccttgcattgcttgagtccaaagccactgagtccatgcagtttcctcttatatcctttctgcctcctccatgtctggtcatgaggagggtggtgaatgcagcagacctgcaccacgcactgggttcccttaggcatttatgtaggaaattattgaatgcagccccatgggagaggtattatttttatcttcattgtacagaaaaaaaaaaaaactttatcagggggccgagcccagtggctgatgcctgtaattccagcactttgggattctgaggcaggtggatcacctgaggtcaggagttcaagaccagcctggccaacatggtgaaaccctgtctctactaaaagtacgaaaattagccaggtgcggtggcacatgcctgtaatcccagctacttgggaggctgaggcgggagaatcgcttgtacccgggaggtgcagtttgcagtgagctgcgatcacaccactgcactccagcctgagtgacagagtgggactccatctcaaaacaaaacaaacaaacaaacaaaaaatagaatcacattgaagtttggtaacttgcccaacgtcacacacgaggcagcggcaggccacgtttggagcccagttctagaaaccagaagtccaaaatcaaggtgtcagcacagtgcttccttcttgaaactccaaaggtgaatccgtttcgtggctcccggcaacccttggcctcccctggcttggaggtgcatcacctccatctctgcctctgacttcacgtggtctcttctctgtgtgtcctctcaccttttcttcccttggaagaacgcttgtcattggatttagggcccacccaaatccaggatggtctcatctccagatccttagcttaattacatctgccaaggcccttttgccaaataaggtctcatttgcaggttccgagtggactatcttttgaggccgaggggacccaccgttcagccccctgcagcctcgaagcctcctttgtgctctcggccacagcattctaaccccaggaccctccccagtgctgtcttccctttccttaacttacccttttcctttctttgggtgttagtgtaaatgtcttctcaagagatctctgcccctgacagcctgcttcaaatggggtgctgcttaagtctccctcggcacctcttccttacgttacacgtgttacaacagctgatattgttgttatgtatttgctcacttgttttgactgtgtcctccccactggcctttgagctgagagctctgtgcaggcccgggacaggccacacctgtttggacaccatgctgccttccgtgcccacagcagagcggccactccataaaatgtgctgactgccttcctgcctggatgtgcacttgccccagaaaaccaatctctctgcaataccagtgcctccaaaacacatccctaatatcattttttcactgaaacacaaagctgatcataaacgattaggccaaaagtggcagaccaccaggtagacctcatgcccttgtatcatctcccctcactgaggcccagatgctataaacggccacatgaggcctatctgtcacctgttgtgcctgcccttctccagcaaggtggcatctcagtctggagtgctcggcatcaccttgagaacaagcttcaacacagaacccagccttgtttttccccagtaagagaagtgatacctttttgctcctataatatttacaccttggtagtctcttcgatctttcgcagtggcaccgtagctctgttttctgttgtgaatgaaaacaacatgctcctttttcccatgtagttttctatggagtttcttgcctccatggatccagcccaggtgaatgggaagaggcgggacaggccttgggtgggtggattaccagccatctccggggcttcccaaagagacgcaggatgtggcgtgttttatgaagtccaggctgcagcctccagcctgcttctgcaggatgccctgatggtagtgatggttacaaagcgcagctgaccagggcctcagagccaagctctgacgaaaacaacgtcctctccccgtctcactccttaaatcaccaggcctgctgcctagagatttcacaaggttgtcccaaattcactgctatgtaggtctcaggcttggaacgctcccacgacccccttctcacccccttcactttatattcctggctctgctccctgtcttctgcagctggtttattcactgtccaaaaatactggcaagagagtccccccacacacaattattttttttagtcttggtcttcacagctcttggaatttttattttttgctagctgacgtggaggccttagggaccatcggtgtttccaaagcgactccctaggcccgtcctttcctgctataatttatgttgctgttggtgggagttacgtcagaagactgcagggtagaaaatgcatctctaatttaccttctgttacccctcgacagtttgtgtgtggggaagagctggggagggaggggagaggaaggctcagatgcacttgtatgaaaagccagctgcatcccagcaggtgcagcaggggcaggagagtggagtgcagagctgggacacagcagggtcatcatgaggtgccgcccacatgcaccagaaagggagaggaaggcggctagcctgctaagacggcgggaggacggctggtgtaaggttatgtgcctgtaactggtttttgcttccacagtgaaaccccatctatgtgctttccatgtgccagcgatctggcattcatatggataatttttaaaaatttaagtattctacactgaagcataagttacatgtgttacttggacacctttcagaggaggccttaaacctgggatgtctgctgccctgagggtgcgttagcagctcgcagcacttctgaaaccctatggctttgccctgctctcttctcagagctcacagagccaggggccgccagggcagggaccagaactgccaggtttgtactgagcgtcctgtgtctctggatggtgaagctggtccgaactgctgttgtgactttatcttctggtctgtcttcatttaatacagcaaacctgaaaataaaaagtggcatctttctcttccagcctctcttgattctacctgtccatccactctcaaagaaaggggcagatgttctgccatatgatcctgttggtctcagcaaacctttgctgcttctctgctctgggcttgtgtctatcaaggccctgaggactccacttcagcaggagacggtccttgttctgcaggcgcttgggaaattttggggtagagctcacctttctctccacgctttcggtttctcaccaaagcctctctaccttactcttttgcttatttttaaacaaacttatgaaggtagaatatacaaagaagcacagctccgtgcacagtattgctcatcacggtcgagcatgtgtgttggggcgcacgtgcaggtatatgtcagtacagtaggagggcagttgctggcccctggggcgcgcatgtgtgaccacataacagctgccagctttgcagaatggccgtgccatctccattgccgtggctggggtggctttctacttgccccatgtcctcactgacaccggtgttgtcagtaattctctctggttttggccgttcggatgcgtgtgtagcagtatctggctggggaattggtactttcctcatcaacagtgaggccgaacttctgtttccttatttgccatttggatatccttttcttgtgaagtagccatgcaagccgtttggttttgtatctaagcttctattttattcacgtttaggagtcctagaacaggcctggcagagtggctcatgcctataatcccagcgctttgggaggccaaggcggatggatcacctgaggccaggagttcatgactagcctggccagcatgatgagaccccatctctactaaaaatacaaaaaaattagccgggcatggtggcgcacacctgtaatcttagctactcaggaggctgacccacaagaatcacctgaacccaggaggcagaggttatagtgagccgagatcttaccactgcactccagcctggatgacagagcaagactctgtccaaaaaaaaaaaagtcctagaacagaaaaactagaaacgattgatagtaaaaattcaaattaaaaaacccatcacaccccgatgactggtcagtgagtcaggctgtccttcaggcctcgtggtggctgatgggcagcccctcccagaggcagaggcaggggcagggcgcctgttcctgctgggtccaggagctcttgcacgctacatttcttctctccacctcttgctcgtcagccaagcggttatgtcacctgttggagcgttgatttcctcacccaaagggtgcagtcaggagcaccttctgattctgcatgtggatttaatgaagtaatggttagaagggccagcaaaatgggagccctctgggcgtgtcggctgttttatgatcactgtttatgtgaaagtgcctcttgccttgaagtttcttcccggtcctcagggatcagtcctcatttcaggatgagattgcaacttgttggctttcccctggaggcctcatgggacctcggagccttggagcccagtagggctgcgccttcctgccctcacaggagagggtgagggaaagactggacccaccttcagctcctgggaagggataactctatcacgaatctcttatattaactgttctttattttagccctgtcaagctgtctttctgtcgttttagtctccctagatgtgttttgtttttctccttactgcgtagctcagagcaacttccagagtgagtaagagccctgccctctactactgagactgtgtgagggtggtctctccggttgcttttggggatctggtccctgctgcactcgctggccccgcacactgtctcctgaagccccgtgtccacacagttcaggcttcatccacccagcccagtgtggggtccttgggaaagttggggcctcctttgagtcctcccccagaacttctgtcaggtagccatctgtggaaactgccagccacaccctcccccacaaggattctccttctgtcttctctatgccgcagatggaggatgcctctttctgttgtctcaggaccaaggtacagttgactcttgaacaacatgggtttgaactgtgcaggtccacttatacatgggtttttttctgtctctgctgctcctgagacagcaagaccaactcctcctctttctcagccaactcaatgtgaagatgatgaggaggaaggcctttatgatgatccacttccacttaatgagtaggaaatatattttctcttccttatgattttcttaataaccttttctctagctgactttactataagaatatagtataaaacacatataacctacaaaacatgttaattatgtgatcagcaagacttccatttgataataggctattaatagttaattttgggggtgttaaaagttatatgtggattttctactacatgtgaggggtcagcatttctaacccccacattgttcagaggtcagctgcacatgcaggaggcccgcattgatgttactgtagaggccctgtgttatagagacagtcataaaaaatgaaggaccacatgtggggtcctgccgcatagcaattggggattatttaggtagcaaattgtgtacctagtggattacttctctcctttctcatgtcgttcaaaataatgacttaaaactgaagaaaatcagttcctgtggtcatatttttaaatcagggaaagttcaaggaaatattagctataacaggtggttggagtaatgggaacttactaagaggtaaagagaactctaaagaatacaggaagagcagaagcaggtagcatcctgtgtctttaggtctgaggcagagcacccaaggaaggaacaaatcttgatgacagtgactcacacacagctactgtgaaggacagacagtagctgctaccacagttttgtccagggatgaaattccttggaccttgttagagagggtgcaactggggcccactgaatgagggagaggcttgtagaggttctgtactggtggaactctctgggaagccacacttaagatgtcagggaaaggttccaagggaagaaactgcatctccaaccaggataggaatctatccaaaaagttggtgtgcttggaagctacccactggagtacaggagaatgctgtccacagggaggtggaatgcatcacaggccactgaagaagcatgctgagagaagccacataccaggaccagggagaaaagcctgttcctcctgcattcaggttacatctagtatcctttcatttgaacttgaaggactccctttagcatttattgtaatgcaggtctagtggtaacaaactttctccattttttgtttatctgggaatgtgttaattttcaccttgatttttgagggacagttacatggatatagagttcttgcttgacggttctgttcttaggcactttaagtatataagcacacttctttttggccttcaaggtttctggtgagaaactggctaataatcttgttgaagatcccttgtatgggatatgtcacttctctcttggtgctttcaagattctctctttgtcttttggcagtttaattacaatgtgtcttagtatgggtccttgtatcctacttggaatttctcgagcttcttggatttatagagtcacatctttctttacatttggtaagcttcagccattatttcttcaaataatctcttaaccctttctctcttttttctcctgagactcgcttagtacctacattgatccactcgatggtgtcccacagatatctctgcttacttttctacatttttttctttttacttctcagactcagcaatttcaattgtcctatattcaagtttgctaattctttcttctgcctgctaaaatcttctctgaactggtggatttttcatttcagttcttatacttttcaattccaaaatttatctttgttttcttaacttccatatctttattgatattctcattatgtttatagattgtcttcctgtctttatctgtgccttcatttggttcctgagcatttttaagacagtcgttttaaagtatttgtctagcaaggccaacatctgggtttcctcagggacaggctccgccaatacattttgttcttttgaatgaaccatactttctgtttctttgtatgccttgtgatgttttcattaaaaactagacattcaaatcttagaatgcagtaactctagaaatagattgtaccccttccccagggtgtttggttttgttttgttttatgatttagtggtatctctggatcaggaattaacctgaagtgaaagctgaaggtcttatcaggtcttttttgaacctgtatcttttcctagccattgctggtggctttctaagttctcctagatgaagttgcttttaaatgtctttgtgcctaaatgtctggctcctaaaagaaaaaaggagggaaatcccctggaagccacttcacctggtggaggttacagcaatgtcagccatcttctgcatctgcaccttaacaactgaaagtagcaatcaacagtcagaacacagaaaccagatatttggaagataaggttcttactgctcaccctgactccagaaagttgcaacaggagcacagacatagctgcctgccttgtgggtgaaggatgggcagtaactgttaccacactaaaggctgaaattgagcaaaattaactgaaattgacctggctttcccctggaagctgcaagccttcaagtagactgcagagtttcaaaatagtttcttcaggtagtttttgccagtgtgattattgtctggatggagaactggattcctggtgcttcctcctcagctctcttcccgacatcattccctctgttggtcattttaagatcagctctgataatatagttcacgtcagtctagtgcttattggagaccctcctgtgcaatgctctctgctgagaacacagaacccagatatttgggagataagatccttccagataagaggaacaggaggaagacagccctccatttcataaggttagtggtaagcagcatagcagatacccaaacaagatgtggagatgctccaggtaggaaggaaaaatagggtggaggtggcctcaaagatggacagagggttaggaggtgggaagtggggattacggggcctgtgagctagataaggggccacacagagactgcctgttggagaatttgtcagggagaagcagcagcagaagcagatgtggagggaggtgtgccaaggcacgtgtggtatcccatgtgctccgcctccagacccacttgcttctggatccagttctcttacatcatatcacatcatatctcctctccgcctcctcactgtcagaggtgaaggtaattgttgtgtgcgggttaggcagatgtaaaactggagaaatcagctactggaaaggcgaggaaactgaagcgtaaaaggaagctcgataaccactcaggaagttaatcacatgatgttcaccaatcagagtctatactcaagtgtgtaggaaaggtagctttctttattcttctacgaacccacctaatttgtatttctttactcccttccagtccgtgttttgttcctcatgacttcatgtctgccctgctttcccttagtctgcatgtaagttccgcgaggagcatctggtccttgtgtcgtccggttccttagtttcctggggctgccataacaaaggacccccaaccaggcggcttcaacaaccagaagttattgtcgtacagtcctggaggctggaagtccaaatcagggtgtcgacagggttggtttctcctgagcactgtgagggagaatctgttccaggcctctctctcagcttctggtggcttgctgacaatgtttggcattctttgtgtgtctctctgcctgtctctgtgtgtgtgtgtgtgtgtatctccagatgtccccttttcataaggacacttcatattggattaggggctcaacctactctagtatagcctcattttaactaattttgtctgtgccctgttgaccctgtttccaaatcgggttgcactctgaggcactagaggttaggacttctgcatagagttttgtgggggcccagttcagcttgaaacgttgtgccatgctgcatctgctgcctcactcgttccttctccggtgcccgctcgtggggactcacttattgccagggtgatgtttctcctactgatccatgtggcttttgggggccagcccttctgtgctccttccatgccgtgttccgtggcacaggatttgattcattctgtctgccaatggtacctggcccaggctgcctggggaggctgtccgaggccccttctgcctaaacacaccatgcagtcatttctctggaactgatgcctcccttgccttctagacaggaagcagaacacaaggcccctctgttctcagattccataaaccttctagagggttagccattgcctaactggaagaccagcagagctcaaggccccactatggggccaccagtaggtttaatctctctagatctcttcttctcctgggggagggaactgttttctagtgtatatgaggtagacagaagtatgaaaggggcctttctcctcaggatattttctccaagacaactgggtagaccaggagttggcaaaagtaaggcccgtgggccaaatctggcttaccaccaggtgtttataaagttttattgggacacagccatgcctgttcttttacatgttatctctagctgcttttgtgccacagtagcagttgagtggttggagactatttggcccacaaaaccaaaaatattcactatctggcccttcacagaaacatgttttcaacccctggagtagacctttatgacacaaaagcccaaaggcttctgccctcttctgctgttacatctctcccctaaagcaccaatcacagggtggtcttgctctctgaacatggaaaatggcaaaggaggaaaaagaaatacacaacacgaaatggctaatgtgtccagatgacatttggccaacaggtgtgtgtgatttgtggaaattcattgagcagaactgtttggatgtgtgcccttttctttctttcatagactgaatttcaataaaaagtgcgaggggtgggagtggataagaaatcttattccatcatgatgaccttggcatcatggaaacgaatggaaccactgaggttgcccaggttgtcaaggacaccctggggccttgcagaagcacagggcagagccatgctttgccagccaggccctcacacatgtggacttggccagtgaacacagtctggaactccggaatggcttaaaaccccagcctcagcacagagcatctaggatccaagaccatagcattgaccatgtgtggtctcacacctgcccaggtaaaggtagcacagcccggatctaactggtctccagtcaaagcccatgagcagtgaactcgttgttcttattcttttcattataaagtaaatgagctatgtatttactcatcctgaaacttaacctccagagtatacctgggggggcatttaaaggtcttcatttcagagaagacccctgcagaacacacacacaccctctccagaagtgtcccttgggttttcagtgttacccatggccaaattttaagttcagatgaaggacgcaatgtgtggatcttgccaaactcatactcactgccttctttttccatatgaccttgatttgcagttctctcatgcacctttcagagggctcacttaaacatgccggcagtgtgggtctgggattgtgggcatttggtctgtaacagcagagagggggtggctttggaaaccttgccctgcccccttcctctcctccccctggcaagagagacggaaacagctctcctgccctttggtcgcaccacctggttaacacagaccttcttcttccttctagccctgggcctggaggcacacactgcccgggtgccagtgtagaacatgcggtctgcgagaacctgccctgccccaagggtctgcccagcttccgggaccagcagtgccaggcacacgaccggctgagccccaagaagaaaggcctgctgacagccgtggtggttgacggtaaaggcatatggcatgtccttgcatggcagcctcctgtcctcccctaagaatataaaaaccacctagggaagccggggggcatccctttcccaaaccaacccagcaagacactccagtcctctgcccagctcagctgcggcccaactttgtaagttgtggggttgaccttgaatgacccagctctctgagatgttccaactgcagctgttgaagcaggcagcaggccaggtgcatcctgcaaccccatttgtagcgaggaggctgtgctggcatcctgcccctggcgccatgtgtggagggacccaggacgagctgaggagaccaaggagctttacaggggcatcccagtgtgctggtgcggctgctctctggctttccaatgtggatgatccctgtattgcttctcttggtttattttgaattggctcttaatccttggctaggatgttggggaacattttgagaatagtttgcaacttaggaaagatgataataagcacaggtcccattttctttccaagagctttctcctgaatcaagaggctctgccccatcgggccactgcaagcatttccagtagctgatgaagttctaggtggtgtgtcatgtatacatttgtaatgtctgcttaattaatgtccttaatagatgaggacaccccaggacccgcttcagggttgttgggttttttttttttttttttttttttttacctaaaactgttcttctttaggaaacaagactttgtgctataatgatgacatatgaacccgtttatcggtatgtcatgtacaagacacaagttagctctacatacatcgtctcatttaatacgcaaaacaagctgtgcagaagatgagagggaataaggttacaggacacctctaagcacctgcagctgacaagaggccagggcgggagctgacctcacttccagagcagttgactcacagaaaataagcagctattgcctggctgccaacacttgaagaagacagaccgcatgacttcatgggtgtggagtgagggagcttgaagaagaactcaggaaactgggcctgatttttagacagcctcaaaagtgttttgcagaagaatgaagttctgatgccaggtcttatgtttcttccctgtgatgggaagagcctttgaaatctgcatttggccttctgctgtcgcaagttcaggtgtgcgtagctgtgtgaaggtgggcccgggcatctctggaatagcagcctcagatctgcagcttttagtctaacagcctgacccatcctctttgagctgactcgtagagcaacatgtgatgctctaaattgtagcagataacaccagcccactcagatgaggactcatttgaaagtattggggagccccatcattgtccttttttaaaaagaacaccacctttggggaccgtgtaatgtagctgcgccatcagctcgccagcagaattcaagagaaacacggcctttgcaccctgaattttccctgcagttgagggagaggggagacctgccctcctagaaggaacgtgtgcggctggagccgtgcagttgcacaccggcctttgcctccctccgcctggctgtgagtcggatgcaggaggtggcaggaggcttcccgctgtgtcaggcacacgcagacccctaattggaagcgagagagctgccatttggttctcatgagaagcagccttgaatccgaaccttcagctttccccggcatgccagataaagatacttttagacctctttactgcccactcccactttgcaggagcaagaagaggtcaggtctgggacagactcacgctcttcaaatttcaactcaactttgtgccccaagttgttctttccttggttgcctgcttcagttttcaatgctcccgtcttatttattcagcacagaaatcccactgaaatgtctgtgtttccacagatttctccaagtccagattaaacttctgttttccttctgaccgcttttggatggctggactgtttcgttgccttatcaccacagtggttgggacttgagtctgcccagatcctccacccaggaagccttgcggtgtggctctctggggggccacttggattgggaatgtgacctttcacccacttcctttctgtttctctctgcctaagtcctaagttattgtcactagagtgccaccgcctttgatctgaaaagagcagccctgtttgatgaggacagctaccaggcagtaagtatctcgcgtttgaaggagagaccccacgctcggggctttgcacaggtagctcgacacgtcctgctctggggtagaatcgccctgacttcttgcatctgcagtttcatttctctcaaataccaacagaagccagcatttttaaaaggagcacttcatcaagggtaaaaacaaaataatagatggccaatttagaaggcaggaggggaatacggattataagtgttcctctgaaaactccatttataagaggcacagttctagctgagccgtgataggaacgtttcctgtggttgggctccgggctcttctgaagcccattatgactgccctattcatagcagtgctatcgctgcggaattctttggcgagtgacgcacagttcaaaagaagggaagctgtatttttgttcttttttttcctcttcctttttttaaaaaaaaaaaaaaaaagaagaaagaattcttgcagaggtagattttccaagggaggattcaggaccacaaatccatcccacctccaaaagaagacaaagatcctccttagaaaatatttctaaatggaaaagcctttagacagaaacccattgagatggcccactgccaaacccaccccatttctgcttttctcatggaatctcattgaagtggaaaccttcaagagttcagtcctccttgcccaggccagcaggccatgggcccactgaagtgtcggagagcttggcaaaggctgcgtctggacgtggctgtgcgttcccagcgcctcctgcctggcacggcagaaccccccaggtctgagcctccgtggggatgaggggcgtgatggttaggactctctgacgacagctccgccaagccagctggggccgcttaatgaaaaggagggaagctgttgcaaagctgaagatgtcaggaccttagctctgtggtctccgaagcttgcatttggtagtcacaaccccgtgcacccactgcagactggctttctcagaacttgtccgtgtggaagctggtagggtagcccacggcacctcttatgtaaatccacatcctttacccagatccttttgggccacatacagttcaagcttcagagcattttatgtgttcaaaaggtaatgacagtgcatcaaccaaatatttgtattgctagtgggctccaggagagcaccccatagtcagtcacgtgggtctgtccaccaggtgacctcattaagggggatactgacactacctagagctcacatcagtccaggctggttttgctgccaaatgtgtttgccacaaatggaagagaacacttagagttttcagagctttttgaatttctgaattacatataagggagtgtagccttctttgggatccgtcaaccacgagcagacatgacctctctgcatctgaatttcagtaccgagttcccaggaaagagacgaggaatgggccagctatgggcaggtgctcactgctggtaaaatccgcagaggcctgtccgccggggactgatgagggggccgggttgggcagctttgggaacaggagtctgagtagcctcgtcagcatgtgtcccccacagaggaccagggagaacttggatgagtgctgtgatgaactcaaagcaatgtccccaccatactaagaccttctaactgctggcctagagagagagcagagagactgctgagagccacgagtgtcttcttcactgcagaggaatgttccaaacctccagcgggcacatgtgaccacgtggttcccaagcttctgagcccatcttccctgccctgcctgtgaccacctccagccaagcagaagtcctgatgccaggcaggccagcaagaagccagaccggccccaggctttgcagcttcagtcagaattccatctcagcacacaccagccatgcaggtggcacgttccaagcttccttccttcaagtgtgtggttgtataacttttaagaaaatgtgatcttctgtgctgttggggatgtaagagtgttgatgctgggtgcaaagctgaatcccaccacctcatgttatttactggggtcttgttcctggagattaatctcccacctaaggcaacctggagggaaatagagaattttgagggattctgagcctcctcctcacattttaaaaaccttatcctttgggagatcatgccatatagtttgctagagatgtgggtgccctgaattccaagcagaggcctcaaaggggagacggacaaatggagagttctggctgagcagggaagggaagccccacctctagactctgttctggagcctgagtgtccccagctgtccaagctgtggagggcagtgtctgcaggtgagagctgcatgcaggtggagctgagcgttccttcgtgcaaggctcgtggccagcatccctccagctgaggttggccttcctgctttgcagagtccgcatttctctgctcaccctaaagagtccagataaacagccttcatccctttgaagtctggcctttctaacttgcctcaaaacagcctctgcttttctacccaagtcccacttccacttctactcgaatcagaggatacactcggaagccagaaacatgcatgaaactggtggtttgtttttagcaatgccactttgctcttggtaattttggccctaggagttctcagtttagagaggaaattgcgatgatggaaaaagaagcaggctggagccaagaggcggggcgtgaccctgccaactgaagacagtcgagcacttcctgtgagccctgtatgcatgtctgtataatggaacagtgacagcacccacctgaaacgaatagataactacttagcatgctgcctggaacacagtagtagtaaatatcgtttatgatttcatcatccttactactgcagctgttgagcaaatcacctcaaagctcaattactcccagtactgagtcaacatttcagtctaaaggtaattaaaatccagtttcaaaccacttcagccaagggacccttgctttcaacgaaacagtagaggcagcccagtgtgtggagtagactccacgctgggggctgtgttgctgtatttctcccaccagctccacaagatgcttggggaacctcagggctccagagggtacctcagtgaccctgtcaagcaagctccctcgagctaatctcagtatatgtctccatcttccagagttctccttccaccagccacctcctgaggtccttccctgcaagtggaaggacagctgcccctagcctgccagcacgggaaatgagtcattccttccaggctgcacccagccctccgacagctcccatcagacctgaaacatgtggcctcaccctgggtttgctgtacacttgtccatgagcccactggggccttcagaagcaaacatcacgtgtctgtctttccccggaagtgccccccagagtgccttgtgtgagggaggggtcagtccctgcttggtgaatggatgcatggtgaggcatcattactccccttacctgggaggcttcagatctccagtcttctcgtgggcagatgtttacccccacagctaaccggaagaactgagggaagcatttccagcacactcctggagcttctttccagcgctgtaagacaagatttcctgtggagcctggtgagaagcagacttcgtgggacaggaggcctggaaggtgactgaacacaggggtggtttagtcctccagtcacgagacagcacgtctgctctgacaggaactctgcaggtgggatgccaaggtcgtccgaggccaggtcggctcagaagcctctctctgtccctgctcttgctggcccggggccaccagaaggacccactgaggaggcctggtggagaagacaaagagcagcaaggaggatgaaggtctttgactctcgccctgtgcaaagtaaccacatagatggcattagggtgaggtgacagagagagagaggagaaaaatgcattcctcttgctcaattacttacagaagaacaaaatctattcaacctgtttgttcaaaaatatatactgagtcttgcggggcgcggtggctcacttctataatcccagcactttgggaggccgaggcaggcaagtcacgaggtcaggagatcgagaccaccctggctaacacggtgaaacggtgtctctactgaaaatacaaaaaattagccaggcatggtggcgggtgcctgtagtcccagctactcgggaggctgaggcaggagaatggcatgaacctgggaggcggagtttgcattgagctgagatcgcgccactgcactctagcctgggcaacagagtgagactctgtctcaaaaaaatatatatatatgtatatatgtatttatatatatatatatttatataaatatataaaaatatatatatactgatatatatatatcagtatataaatatatatatatatactgagtctttctgtgagccaggtcctgggcccactgtggggacaaaaaaatgaaagcttaagtcccctgccctctaagagttcacagacccagcattacttcaatctgaagatgaataaaagtcatccctttcacactcttttagcgatgggacctgccttataataaatcccttcagatatgggaggtgcccaaacaattctaggacaacaggcagatgctgttgctttaatggaggtgtgtgcacagtgcatgtggagatgctgctcctgccccacctcagagctggcgtgagggaagagctgcagggtggaagcttccagggcagtagaaggcaaagtgctgcgagggatttccaggcagagagcgcacaccgggcaaaggctggggagctgggcgcgttctgggaggtcatgtgtttttaggagtaggggaaacccaggtttccatcctgcctgggtgcacatgcggctcttataagttgtcctagcggcgcacatgtcccctttgtaccttactcccactcagtttcttctgggatctccgtaccccaaagcacagctcgactgtcacccagcagctaggggagcactgaagctcttaccaaagctactgtcatggtgacccttggggccgctgccctcactcagaggcattctcgttccccttcccctccccctcccttcacaccctcgctataagagtggctccagctcccccttgatgtgtattcaacgtagagattagcacacaactcttcctttgttcaccgggtatagttgatgccttaaggaaaaggaaacttcctgtatcattgcaaaggatagagagatgagagaaggcatccccacagagctcagtcctgcactgtcttcccctgtggctgtgggtctttttccgcttcctggagcgcgtacctgagctcatgcacctttactgacctgtgcggacctctcttcctcagggtttccctctgcccacatgtacctgtgccctgcatggcccacgcacaccttcccgtgtcaacgtcctccaacctttccctcctcagataagccatgtgaactctactgctcgcccctcgggaaggagtccccactgctggtggccgacagggtcctggacggtacaccctgcgggccctacgagactgatctctgcgtgcacggcaagtgccaggtgacgtacttctccttcggtccttggtggggctttggagaggagactcactctccccagacagggagtggggtagagcagaggtctcaggaggcctaggggagtggattttcttaggaaggcacccagtgatgccgcctcctgccgccagtgttgcctggtgcaccaaccctagctcagtaatgactgagtgctaggccaacaaggagtggaggtggaaagaacaggcacaacgtattctaagactttgaaaattgctttagacatcatgaccaagacgaaggtaggcagggtactaagatgcgcctaaaggatgtctgcacaagccaggccccatttagtgcagaagagacggcagaactgagccaatgcctgtgcaggtcacgccaggcagataggtgcgcccagctgtcagggagcatccatctactggtatatagtcccaaaggcattgagggctggatggccatgactggttagaacagtgataaaaaccatttaagtgaagaaagagaggccgggtgcggtggctcatgcctataatcccagcactttgggaggccgaggcaggaagatcataagaccaggagttcaagaccagcctggccaacagggtgaaactcagtctctactaaaaatacaaacataaattagccgggcatggtggcatgcgcttgtaatcccagctactcgggaggctgaggcaggagaattgcttgaacctgggagacggaggttgcggtgagctgagatcacgccactgccttccagcctgggcaacaaagcaagactccgtctcggggggaaaaaaaaaaggaatgcgagaagaaggaaggaagcttaccctccacctgcattaaccctgcccaagctgagggccacctgtagcccttaccctccccaggtggggctcctagcctggggtagcagaggtgactccatgctcccattttgtccctcagaacgagcacctcctgaggtggcgcagcagctgggatggggagtgggtgtcgaagctttgtattttctgtgcctcgcttatgccacaggtaccatactccctggtgactcgggtcaagctgggcatgttgtgagagagccccagcatcttagtcagcttgggcacctgtaacgatacaccatagaccaggcagcttatgaacaactgacctttattactcacagttctggaagctgggaagtccaagattgaggccttgaggcacaggcagatttgggatctgatgaggggtcgcttatcatagacagtgtttcttgctgtgtcctcgcatagtggaaggggctggtgagctctcttgtgagtctcttttatgggggccctgatcctgttcatgagagttctgccctcatgacccagtcacctcgcaaaacatccacctcctaacaccatcaccttgagggctggtgattcaacatgtggatttgaggagacacaaacattcagaccacagcacccagggagcgctctgccctcagccacacatacgcgttcctgtcatcctatgaccacgttccctcaactgtgtcctccacaggggagcccaccaagagctagtgacaatggcagctcctgatgtctggagcaggcagatcagtgtcaggatcaccatgcgttgccctcacagaactgtggtgagccagatgctggcttccaggcgtcaggtccacttgcccatgcggacagcagatctgcttatgctctttgcttgctcagtgcctagcagagtgcataggcatcaacatttcagtgtgcgtgacaaacagaacaagaggaggcaaggcataaagacagacacaaagacagcttccagggtgattgctgcagcaaaccgtttccacccaaacagatgctttttcctgctaaggccaaatcagtctgaaactgggatttttcagggaaaagcttgacaagacccagactcctttggcactgcctggctttgttatcaaatacagataaatgtgggtgataagcgcctggtgcccaagagtcttggcacagcaacctcacggggagggaggcagtgatgagtggttgagctggcccctcctggctgctttcttgtaacaaagaatgtccaaggccctgcccgtcgggcagtatgaacaaagcccttatcattgttactgaaatgaggcatcgccgatggttcttggtaaacttctaaccagccaagtgcagggctggtgtccgacccaaattacacacttccacagaccatcctgcccaacgacttaacgttcctcccaagttagagttcttacaccctttagagcagcaccagccgagccatccccagcctctgccagcatcttctgcagcgttcttgccaatggggaggcatttctaagaatcctaaaattgtctagccagtggggtctgtgttactggctggacataatttatgctctgtgcgatctgtgccaatgggctccatccatgatcttggttttaatcacagccttttcaactagaggatgttccatactatgacaatgaaacctttagtcgtagaatcaaagagaaaatgctgctccagacatttgaatggcctaagtctgtggtcatgaggatagcattgagcccaaccctgttctgcacttgggtgtcgtcttagtcaactcaggctgctctaacgaataccctagactgggtagcttataagcaacagacttatttctcaacgttctggaggctggaaatccaacatccaggggctggcatagatgggttctggtgaaggcccactttcatgctgtagactgctgccactctgtgtcctcccatggcataaagagagctagtatccaggcatggtggtggaggcctgtagttccagctactccagaggctgaggtgggaggatcacttgagcctgagaggcagagtttgcagtgaatcgagattttgccactgcactccagcctacgtgacagagtgagaccatgtcttgaaaaaaaaaaatcattttcttgaggccaggtgtggtggcacacgcctataatcccagatctttgggaggccaaggcgggcagatcactggaggtcaggagttccaggaccagcccagctaacatggtgaaactccatctgtactaaaaatacaaaaaaattagctggatgtggtgatgggtgcctgtaatcccagctactcaggaggctaaagcaggagaatcgcttgaacctgggaagtggaggatgcagtgagccgagattgcaccattgcactccagcctgggcgacagagtaagactccatctcaaaaaaaataaaaataagagagctagctagctctctagcctcttcttacaaaggcaccagcacattcatgagctctaccccctcttgacctaatcacctcccagaggcttcactcccaaatactatcacgttggtatgaacggttcaatttatgaactctagaagacacaaacatccagtccattgcagatgtgatgggagtgacattgggatgcacgccttcctgttcccagatgccactccatccccagatgtcactccatccccaggaccagcctgtctatttccagtgcctccaccattgtcatcatcattgcagggattggttggtgcctgcactgcacctcacattaaccaagtagagtcaccagggtgcgcaggtgcagatggaggcacctttcatgatgctcgatggtggtcttttgctccttgggagcctcaccctgccactgcagagaccctgcctaccaattctcgaaagcaccatctcccgggtggctgcaccctggtaacccgctgcctccaggcagaccaccagtctttacaaaagagccaccatcctggtgggtggcaacagcacctacctgcatgtacttctccaggttaaaactgtgagaaacaacttgctttctgaaggaagttaaaaagccatctgctatttgtctaacagtactttcttcagacagatactgtaaaggttaacctcagcccactcttaaatcgatgctcacaaaactccaaattgttagtcgtagttaatgaacttttataaaaatcaggcattcttaaataagatcacaaattcaattcaaatatagtacttatgtcttgttgcagtaattgtcaagatgaaacattctggattcctgtggcatttgtgaatgtgtatagcaagaaagaaatggttaaggaaaataatagtaattgtaatgttaaaacctcaggggcctaatgagtggaaagtctgtatctattcattgataataattgtctaattacaaccgattaaacatacaaatcacccacattttatatgagacagcactcacagaaatattgccgtggtttgcctactagcgttttcctctctttccccttcagctataaattgtgctattttggggtagcagacggcattctgggaaatgtcgaggaacatagtaactagttggtaggggatgagaggcttcaaaatggcattttgagtagattccactgcactccaaatagcaggctgattcaaaccataacatgaaacatggaaatgccattttattctgtttttatgaggactgaattaagtttcatttcagtgagtcacaaattatttaacatgctgaaattaaacttaacagcactcataaaattgggagggaattggggaaagtaacagaaacattgtgtatttttcagcaagctcctataaatcaagagtcccatcattaatgattcctactgttggcctccagaaggagagacaccgggttaataagcctctgatacacaactgcatctggagctgctgacatgcaatgagcgagtccagctgacgcgcggctttgcccattggatgatggacagacccagatgtacctgagacccagctatgcttgccttactggtttgtgcacacctgtagccaacattctccaattcagttcctacttccttggtaccataatttgtatacatatcctgggcttgatgaataccaagccaaaacaccttcagggcctgtgaccttcttcagtgaaggaagtacgtctcattaacctgtgcttccctatacactggcccagaggaaagcctttgattgcatattgaaagaagggtcaggtgcagtggctcatgcctataatcccaacactttgagaggccaaggtaggtggattatctaaggtcaggagttcgagaccagcctggccgatatggtgaaaccccgtctctaccaaaaatacaaaaattagccgggcatggtagtgcatgcccataattccagctaaggaggctgaggcaggagaattgcttgaacccgggcagtggaggttgcagtgagccaagatcgcaccagtgcactctagcctgggcgacagagagagactccatctcaaaaaaggaaaagaaaaaaaaagagtggctggatggatggattatgtgttcttaggatttcagtggttctggaatctggagcccatttcaatggacgactttcattgccaagaatttattggcctcctatttcctgtccaaagatcatctgtgaggcaggtagaattactggggaagtttaggagaattcaaagagaccctggtctcagaggacccccaggtaaagcagaggtaacaagcctgcaggaaagcgtgcctggcacttaagcctgggtttgcatcttcacgatgctccccacatgctgcccttccctgcaccgtgaccctgcagctggcatctctaacgtgtgttactgtgggtgccaaacctttatggatagcagtgcctgaaacgtgaaggtcattccctgcaccccttttttctgattaacctcccatgacaacttctggttgaagccagcagaccaagccacatgttcctgcctcttccatgcgggactccactaaaccagcacaaacagtgaagggaagcaggagcttccaggtgaaagatcccacctctttctggatgacagaagtgggtggaagtgtcatgcaggaacaaagcagcagaggccagagctggaagaggcggagagtcgccactgaaaagacagcccaaaccgagagctgtgggcttgagaatggagggtcggaagtgaagagtgggctgaaaacaagtccgagggtgcatcggcatgctcatggtgtctgatcccacactcagagcttgacgggctgtcaagtaaaatgttagggagctgctttccagggtcatggaatgaactgtttgaggaaacccagagcaggcagggaggtctctgtgctgaggacggtgcccagccttctgcgttggggttagaggtcaatttccctcgcactagttacgaaaggaaacctaccatgcagcagtgcccagcttcaaatgtggatccctttcagtcggccttcaaatgtagatctccttcagtaggccttcaaatgtagagccccttcggtcggccttcaaatgtagatccccttcggtcggccctcaaatgtagatccccttcggtcggccctcaaatgtagatccccttcagttggccctcaaatgtagatcccctttggtcggccctcaaatgtagatccccttcggtcggccctcaaatgtagatccccttcggtcggccctcaaatgtagatccccttcggttggccctcaaatgtagatccccttcggtcggccctcaaatgtagatccccttcggtcggccctcaaatgtagatctccttcggtcgggcttcctgttgcttgttctcaaatacgagtgggcaaccagacatcatctgctatttgaagaaaaccagcagcatgaaggagaaagaccaagaaaaacaaacagaaaaaactgaccctggcagaaaattgagataattatggagttctccgtgcagccaaactatcaagcaagcatgcagggaaactaattttgagacacagaagaactcagaaattctattttccatgcatgcgttctgcagaagttacatgtagtttagcaaaacaagaatgaagtcaagaaagaggaagatgggcactacaggccctggtggcactcacccaggaacccagtaaatcctggagtcacggctgcgcaactggcctaaaatctgcactcgcttaaaagtcattcaagaagtcggtggcctccctccaaccgaagagatgggatgaggcagtagttggaagatagctaataagttgaagaaagcaagtactgcttattccagccagaaaaaacaagtaccatcaaaacttgtacgaggaagtcccaattcaaatatgagaaaactagactccccagcttgataagaggtcatcatttgtatgctcttactgaacacacatgtgcttaataccacaccagccactgtgtgtgtcagaggatgggggaaggccaagaatacaaagaattctcagacacagtcctctatgtgcttatggtccgttagggagatgacacatactcacttggaaacccaacgaccagaggcgaaggcgtgatttaacaaccaagaagaggttccacttagacatagcagaaaacccatagggtggaatttcgtttattcctgcatcaggtatttgttgatcacattccgagtgctgcacactgtattgtgtgctgggctttcattagggagcaggaccaagaggatccctgtccctgtccaacatacagacaggccatgtcagctcacaaacgtgatcattccagagattggtatgtgtgaagaagaaaatggtgccatagagagacccagcgggggactgtggctgaggaggacagtgagcaggtggcatggcatttctcttagaggagacagcctttgaggaagagccagcctggcagagagttgggggcagagagctccaggcagagggaagcaagagggagatgggtgcattccagcaacagacgagggcggaggctggcacaaaggagccagggcccaggcagaattgatgcagaggagtgaagcgatcttagctatggataactgactcaagtagatcccaggaaacaagttaagaggctattctggttgcccacctggctgaggggtcattccgggggagggcttacaagagtgggctggagggggttggattcactgtgcatctggagtgggggaggaaggcaggctgagttggtgagcagctggaatgagatcatggagggtcttaaattcatatgtgcggacgtttctgataggcagtggggatctttggccacagatcttatctctctttttgtgtggagattagtctggcagcaggcaggagaaaaatgctcccatagttcatgtcctgattaaggagggtgtaaactagggagtggagctgaacatggaggagaagtaggcaacagaggttttcagggcacaaaaaacccaagctcaccaactaactgggtacatcccaaaatagaagagtcagaaatggcttggaggtttcaggctaggatgcctgtctgtcagttccaagacagtggcagggggtgtccaactagaattaagaggtcaggcagctttggaggagaagctgtcgcattgaaagtggagagattgctcagcagactcttagtagtgagagccagggtggagtgaggggagaagtgggcttaagagctctttgcatgaggatgatggctgaaataaggagaaggcgaaattaccaagaaaatgaaaaatcggaaaaagcagggagccccgggggagctacccactttcacggagtcgaagaagcaagaggagggaggagtcatccaggggctgggaggagaatcagacaggagccatccttggcttccagggcatctttagcacacactctggggtgtctgcttgtttccgcactggcgtctccctccatcttacatgtctttatttccaggttaggcacataacaggcaccacgggtgaatcaatacatgcacaacagagacagggtgggcgttacacacagcggacgctgtagagcaggaggtgaaagatgaggctggagacacgtccactaggtgtgatgaccaggaggctgttgtccctggttatcttcaacaggggcaaagttccagggtggaatccaggactcagacagctaaagatggacatttgccactgtccacggcccatcctgtgccctcctcagcacacggatctgagcactaaagcttttccaagcactttctgcatgtttctcaggagctgtcttgaccaatgaagaacttgtgcttttccccccgttccatcccatctcataccatctcataccatcccatgcctttaattatgccgtgggacattgttccttggtcctttggtgtcacatacaccctgacttagccagaggcacagggcgcgaccagcaaatgctggccaggaacttgaagccctgctttgaaagctgagaaatgggtgatgaagattcctaggaaagtaactaaggatcaccaggataacatgggaagacttgagagagtttattgcctggagtttcctcaggcttggtcatcttgttctcttggaacaccaagcctcataaatacaatcatcaaagctcccctaatattcagaattaatgacttcagttgtgtcctatggcagcttccatttgaaaaccatcccagtttctgccaagattataagttgcttgcgctgactgaaacaatggaagaaaatgcccccgttcgcagattttgtggctgtcacccgtcagcatttagagtcactgctgttcagacatggacagccctgcattccctgtctccagatgcagacagcctctaaaataacaccaagtagagtgggcagaacccatggacctgtcccagcccctggatggtctccagaattaactgaaagggcaacgctgtatgcattcctgtttgcacctgccctgaaaagcccccttctttggggctggaggaaactggaccaaatggggcatctagaagctgttgaatcaggaaaccttaactgaggtgcaggacaaggaaccaggcctgaagccagagactcactcctaccaagcaagggtgtggtttgaaaattataggaagccagtgtaaggaatgtctacagcagagggcacctgagatgagaaagcccaggtgggagctggaacaggtgccaggaaagaggccagtgggagagaccagctctgtgggcattggccctgtggccccagcagaagcaagtctggagaccatgcactggagctctgaagtgaaacaaagcaacagacacgtggtctcacagatttggtctcggcgtttgctaaacactgctgggggacattttctgatcttggctactctttattcttagcccttataattttttttttttttgagacggactcttgctctgttgcccaggctggagtgcagtggcgcaatctcagctcactgcaacctccgcctcccaggttcaagctactctcctgcctcagcctcctgagtagctgggactacaggtgcgtgtcaccataggtgcgtgccaccatgcctagctaatttttgtatttttagtagagacggggtttcaccatgttgaccaggctggtcttgaactcctgacctcatgatccacccacctcagcctcccaaagtgctgggattacaggcgtgagccaccgcaccgggccagcccctgtaatctttatactgagcaacttgatagcagctggctagcagtccacaccgagaatctaggcagccctgcactgcgctccaggctcacggtgcctcatcacagctggcttccctccaggtcactactggatggtcagccccggcaaagcattgcagttggttgccagttaccatatgtgtcttgatgtgttacctacatctccccagccaccatcaagcccactgttatccatttgctccttgctgtcctctggccactaaagccttcaattttacccttttcctctttttatactaactttgaacaagtttgatcttttattcaagctctgccctttttcagatttcatcatggtcatttttagactcaacttgctcagcttttagaacatctaaaagtcttctctggaatctgtccagttatgctatcatttttggacagaacaatagtaatttcccattagatctttttcaaaaaaataaaaggctccgaggatgagacctgaggattactaaatatgaagagcattcacctattcctttgagtagcatgccatgatgcagcggttctcatcgcatggccccggcaagcagcctcagcatctcctgggagccgattagaaatgcacattctcaggtgcacccagacctgctgggtcagaaactctagggctgggacagagcagtttgtgttttaacagccctccccatgaggccgatgcacacttaagttggagaactgctgccatgatgaacagaggatgctgatgtctttggggagttgtggggccaggcacttgcctccagggatgcgcgtgcagccagcctggcacccgaggcgctgtgctagctctaagccctgcctgcaggtgggagtacctgtgagggggaagcacggtgctgcttctcgtccaggcatcacgggaaggggctaactcacctccaccaggattatcttgcatcttgatttcttgagttctggctgtagatccctttggagtctgaagtgccaatatgtaatctggggtgcagggcagtaggaaaaacccagttcttgttctggaagcattagctttatagggggaaaatgtggagggacatttaggcaatgtggctagtaaataattacccaatgttcagtataaatttaggttattttgcaggatacaaaattctcacttttttaaaaaagaaaaaaagagtccaaaacctttttctgctttttagaaaacaggctgtgcttctcagatccacctagggtagaggcagcctctcctctgctctcagacgtgccttgttgaaaaggtatgagagatggggctcttcatagactaggtcttcctacctgagaaaagaggggcccgtgccaagccctgcctgaatgagctgtgggcatccctaccttgttagaaaagtctgtggtttctgttgtatgttctgagactactggttgtttcagccaagttgcaggtgacccccacagcctagaggggaacccccatcatgagaaattgtggctgcacctgctggtgtgagggttcaggcttcactctctccccagggtctctgcccccaggcagtcagggcgtcaggcctcagcgtgacccccatgggcacttgtgccttcatggatctccctccagaacaaataccaaaaaatagactttacagctatgcgggtataaagacaaatataatctaggttggattctgtgcatcttttttctctcctgaattaaaatattttcttgggcctctgaatggatcagggccccaggccccatgtatgctgcacctcatggaaaagttagccttgcagggcagcctctttaaaactcctctgagtcttaaccacagaataatgaggccctctggttctttagaaaatcggctgtgacggcatcatcgggtctgcagccaaagaggacagatgcggggtctgcagcggggacggcaagacctgccacttggtgaagggcgacttcagccacgcccgggggacaggtgagtgttggcccatggggctgctgtggctacagtgttttgtgtcctttgcctacagctattgattgcagtcttccctacatttcatatttaagggctagatggtagtggataggtgacctggaacttcagtttcatttctgaaaagcaagaaaggacattttagcaagaatgatgccttcacgttgctagtagtgaatagtttgccatgaacggaaacagctccccacttagcctgaggtccatgaatcactggtagctgccctgggccaggagctcagcacttcctggcatctcgccttctgatgcacaggcagagaaggtgggagagacacctgccaaatcattttacctgtcgatggaagacgtttgctctgtgtttgaattttctgttagtaaaagtaggataacacatttctaaaacgtgcatgaagccgtacagtctggaaggtctcaggtgccactgccagctgtgactccggagtacctgagcctcctggtccccaggggcagacattccttagcactgtccctagagagggatgccaggattcggttgatgggccggcttcatctttctgcttgcatggtttttgcagctgcaggctgctttgtcttacatgggacacaactttctgatctcctgtcctggaggacaatgtttaagaaagcgtctgtagttgacacctagtgaggggagcacgaggcaggcaagccagctggagagggagctctggcagccttagcgagtgtgcactcaccccccatcaccaggagaacttgtgttgggaggaagaagctgagaaacttattttaatttccacaagttgctctgcatagaagcttctcagttcattttcccccaacaagagaacagaagcacatttatgcctccctgtctcacagaacagccccgtaaggtgaggcatgctctcctctccacttttctctgtgtggataggaaacctggtctggaagaaacgttccttctagatgcctgcgggaaagacagcctactgcgccaacattttgcaggaccctgtgaaagcaaaaccagaggaaatgcaaatgcaaaatgaaacttaaaaatgaaatttcaggtggattttaaagatgggtacctagtcagtgaggcacggagcttagtgtgagaagctgtgcctgccacgtggctcctgaggtcaacagagaaaggagaggcaggagcaggttggtttgggggaaagtggcctccgtagctacactgtccagttcagcagccactggcccctggagacgatccaaactgtaattcattaaaatgaaaccaacttaaaagttcatctttccatctcactgggaaaattttgagtactccgttgctgcacacggccagcggctcctgtgttgggcagcacaggcagacaatattcccagcattccagaaggttctattggacagcacagctccagagcgttgcccatttctgctactggttttgacatacttaatgccattttctctattggtaccccagctcctgggctcccatgagaatttgaccttgcctattgctgctgaggcaacatttaggagcaaaactcctgcagttggtaaaggattactacttactgttggcttttcttttttaatggaagcattggaaccctttgtttattaaattgaacattgtactgagctcccataaagagaactgactacaagtgcgtgattctgtagaagacaagtcaggtacagccaggcccactcccatcgccaaccctgggcaactctgtatgtagaacactaaggaaagttctaccacacatctaactaacataggatctcacttctgagataacccagattaaggtcaaaagtggtcttcctttacccagactctgatctgtataccagcccttgatttgacctaggcagacctgttcatctggccacagtaatgtcctcctctcctgctcacccctttcccttctccatccactccggcctgggccacatccctgtctggaatgtgaggtcagacccctgtggccatgacagtgagtcccccatggaaggatggaccatactggaagcctccttgggtagctgctcccaccctggcttgcagcctagtgtgtgtccttccagctgccaaggcacagaagcctcagcaaaccttcaggcaaaaataagcacacgttcgcttcacctacctggactgtcattctgagtgattgccaattgtcacacattcattttaaggtacacagcagttttttgtttttcaaatcctcacagctggagtctgtgaccacgagcccacatccatgtggattgtatatattgaaaatctgcctgcagtactcatttgcacaagaatgagtcactggctgcctatctagtatagtttcattcagcacaaacttgtcatcatggtctgacatactggaatgcactttagagatacaaatggttacccccaagcccaatcacgcaatggttatttatgcagcatgactacattttaaccgctaggtatacagaaataagttattgtccccaccccaggtacagtcgagggaggggacccccgggcaaacagacagcatcagcctatgtgagcatgaggtggaggcagcccagcaggcgtgttgtgagaccccaggttctggtggggcaccagacctaggcctccaaaagctgagggtggcccccagcactaaaggacaagtagaaatcagctgatagtgggggtagggggaggacacttcaggctgaaggggaaacatatccttgcgagacccagcatggaaatcgtagaaagcccccaggtcaagaggcatcttggtgacgccaagtgcagctgagtgggtggattcaccaggcctatcagtttagataggaagctgactttcatctctgcttgcccctaaagaatgagggaaggaggagtgccttatcacccttaacggtgaatatcaaagagaaactccacaccagaaagataaagcggaatcaaatgctggatttttgcccaattttgtgaagtcctgacccctgcctgaactcctgtgggtcctcttaccaaagttcctgagctgagaatccagggcagacccacacgtggcgaagtgtccagcccagcagagccaaatctccctctctgtcatgacaggtcccagtgtggcaccaggggaagtggcatcctgagtgtagggcgtttatcgccctccagcctgttgcttccaaactttgaacaaatgaggtcctcagctacttatctatggaaggaatcaactcaacttggctatcatattgcttttctgatggatgggcttcaaaatgctcatgccttgggctggctcaagacagctgagttatctgaacctagtaatttgagtatgatgctttcatttcattaaattgccattttaacaatattatctttattccgccctgctccttggcactaaaaaggtggctggtcagtctccaggtgaccagcccatggacagccaggacacacctggactgaagtcctcactgagaaccagccaaggatacctgtgggcttcggatccctttgctttgtgttcttgcgagaaccttttcacgtaatccttaaaagaaagggtggggtgaggatcccttttgaatgtggatagatccatgtgtcacatatttgttcagtaattacctctagagcccctgccacatgccaggttccatgctctgtgtagtgtggggtgtggaatctcgtgggggcggaaattcactgttggggcttatggtacaaaatgaggcttctttacactgtgatgaagaatcgtaaaatgtgcacataaaccaattacaacgtatttctttttctcagttaagaatgatctctgtacgaaggtatccacatgtgtgatggcagaggctgttcccaagtgtttctcatgtaagatgctggatgttacgtgtcgtcccagcagtgacatgcttggtgtggctcttgcctggctcacgcgtctgagtgttttctgaatagaatcaatgggagtaagttgtgtgcgaagccatggataaactcagaggccattaaatgcttacataaactgacgttgaagactgattaccatcagaaaaactgtaagatgaaaccaattttaaagctataaaagacagagtcaaatggaaacgtaccctagcctgctgggggtaagttttctttcccctcaagcacaccgtgtgctctggcagaaaatacctagacatgccagagaatttagccttcgctggcaccttcttccatagaaaagttttcatatttcaggactggtgtccctacaggcagaggggcatttggtaacacccttctggtcttcgtttgtctacactgacctcccattctgaggggcgaaccaaggcacagtctagcctcacgggtttcccaaacaatgagttcttttccattagacccaggaaccaccattagggagaaacgtaagatagtaatattcttgtgaataacttttgtaagaagagaaaaataaaacaaatgcctctccaaatattttatgatctatttactaaacaaaaaaaaagaactctgatttcaggggaaagagtccaagtacacgtagccagagttttacctctagtccatcatggtaccttttcagtccgatggttttcttccaaagatggttaatgctcctgaaaacatgaggaaaaatgggagccccaagacatctcacagcaagtctacttgagaaattcagacacaaatgacttcacagggaaattgctcatagcctagtaatagtaactctggaagatttgagacaggttaaaggtcaacatcactttgaagttccttcttactgctggtccttagggcagaaatggcatgttctcctggaaccacggcaaaggcattggattttatccatggcttcctcatgaaaccaaatcatgttcctgtaactggatttctcctgcttggtggctgaagctggaatgggaaatcactccaaagataaagccttacctaaaatgtgaatctaccttgtaaattctgagagtaaatcctacctcataattattcttcatgcttcggcagtgtggtggtatctggcatccacatcgggggtatctggcctgagagacgccagggtgctttgggacttggtggtggtactctttcccttcttggtggctcttcacacctgcctcaggtggactttgagctctgggtcagagcaggggttggaggactgtgagctcgaggcagtttccccggtttgtggacagagggcctgcctttcagttcagggactgtctttttcattggttacccttttttttttttttttttgttgagacggagtctcactctgcctcccaggctggaatgcagtggcacgatctcggctcattgcaacctccgcctcccgggttcaagctattcccccgcctcagcctcctgagtagctgagattactggcatgcaccaccaaacctggctaattttttgtattatttagtagagatggggtttcaccgtgtcgttcaggctagtcttgaactcctgacctcatgatccacccgcctcagcctcccaaagtgctggaattacaggcgtgagccactgcgcccagctggtttcctttttatcatgaacagagaaacttgtcgtaggacggttagcagagcgcatgcataaggactgccctgcgttgagaggtcacctgagggtgggctcacttgggtaccgagtccgccctgaactgcctttcatcagcacctccaccaggggcacatgagaaaagacagaaaacggatgtcttttcactgatgcatcctgtggcaaagttaagcttaagaatagatgtggataccatgcatcagctgcacagggaccttgctgtggaatgagggaaaggaattgatcagggccccatcagctctgtcggattctgcagatcggtgatcccaatgccaaggtttgttagttgcaaaagtttccatacaacagcagcttccttcaagaacagctcatcccccacaagcggatcttgtttgcaggtatgtttggtagtttgagtggagattcctctgaaaaagattctaatcactttgaccccgaacaacttttatctcagtttttgacattttactgccttggattccatatgcctggaatccaatcacagttgaaactccccagaaggaatggatttctctaagagagatttgctgtagaatattttgtgccacaatcctaaaagctggttttcttgtggccagaatttttcagtagagaaggaatcctagagcaaacacaattttttttccaatttatttctgaattttattttgttttttttttttttaattttattattatacttttaagttctagggtacatgtgcacaacaggcaggtttgttacatatgtatacaagtgccatcttggtgtgctgcacccattaactcgtcatttaacattaggtatatctcctaatgctatccctcccccctcccccaaccccacaacagtccccagtgtgtgatgttccccttcctgtgtccatgtgttctcattgttcaattcccacctttgagtgagaacatgcggtgtttggttttttgtccttgtgatagtttgttgagaatgatggtttccagcttcatccatgtccctacaaaggacatgaactcatcattttttatggctgcatagtattccatggtgtatatgtgccacattttcttaatccagtcaatcactgttggacatttgggttggttccaagtctttgctattgtgaatagtgccacaataaacatatgtgtgcatgtgtctttatagcagcatgatttataatcctttgggtatatacccagtaatgggattgctgggtcaaatgttatttctagttctagatccctgaggaatcgccacactgtcttccacaatggttgaactagtttacaatcccaccaacagtgtaaaagtgttctatttctccacatcctctccagcacctgttgtttcctgacttaatgattgccattctaactggtgtgagatggtatctcattatggttttgatttgcatttctctgatggccagtgatgatgagcattttttcatgtgttttttggctgcataaatgtcttcttttgagaagtgtctgttcatatcctttgcccactttttgatggggttgtttttttcttgtagatttgtttgagttcattgtagattctggatattagccttttgtcagatgagtagattgcaaaaattttctctcattctgtaggttgcctgttcactctgatggtagtttcttttgctgtgcagaagctcttcagttgaattagatcccatttgtcaattttggcttttgttgccattgcttttggtgttttagacatgaagtccttgcccatgcctatgtcctgaatggtaatgactaggttttcttctagggtttttctggtttaggtctcacatgtaagtttttaatccatcttgaattaatttttgtataaggtgtaaggaagggatccagtttcagctttctacatatggctagccagtttttccagcaccattaattaaatagggaatcctttccccatttcttgtttttgtcaggtttgtcaaagatcagatagttgtagatgtgtggtattatttctgagggctctgttctgttccattggtctatatctctgttttggtaccagtaccatgctgttttggttactgtagccttgtagtatagtttgaagtcaggtagtgtgatgcctccagctttgttcttttggcttaggattgacttggcgatgcgggctatttttttggttccatatgaactttaaagtagttttttccaattctgtgaagaaagtcattggtagcttgatggagatgtcattgaatctataaattaccttgggcagtatggccattttcacaatattgattcttcctacccatgagcatggaatgttcttccatttgtttgtatcctcttttatttcattgagcagtggtttgtagttctccttaaaaggtccttcacatcccttgtaaattggattcctaggtattttattctctttgaagcaattgtgaatgggagttcactcatgatttggctctctgtttgtctgttattggtgtataagaatgcttgtgatttttgtacattgattttgtatcctgagactttgcggaagttgcctatcagctcaaggagattttgggctgagatggtggggttttctagatatacagtcatgtcatctgcaaacagggacaatttgacttcctcttttcctaattgaataccctttatttccttctcctgcctgactgccctggccagaacttcaaacattgtgttgaataggagtggtgagagaaggcatccctgtcttgtgccacttttcaaagggaatgcttccagtttttgcccattcagtatgatgttggctgtgggtttgtcatagatagctcttattattttgagatacgtcccatcaatacctaatttattgagagtttttagcaagaagcattgctgaattttgtcagaggccttttctgcatctattgagataatcatgtggtttttgtctttggttctgtttatatgctggattacgtttcttgatttgtgtatgttgaaccagccttgcatcccaggaatgaagcccacttgatcatggtgcataagctttttgatgtgctgctggattcggtttgccagtattttaatgaggatttttgcttcaatgttcatcaaggatattggtctaaaattctcttttttggttgtgtctctgcctggctttggtatcaggatgatgctggcctcataaaatgagttagggaggattccctctttttctattgattggaatagtttcagaaggaatggtaccagctcctccttgtacctctggtagaattcggctgtgaatccatctggtcctggacattttttggttggtaagctattaattattgcctaaatttttgagcctgttattggtctattcagagattcaacttcttcctggtttcgtcttgggagggtgtatgtgttgaggaatttatccatttcttctagattttctagtttatttgtgtagaggtgtttataagatatgatggtagtttgtatttctgtgggatcagtggtgatatcccctttatcattttgtattgtgtctatttgattcttctctgttttcttctttattagtcttgctagtggtctatcaatttgttgatcttttcaaaaaatcagctcctggattcattgattttttgaagggttttttgtgtctctatttccttcagttctgctctgatcttagttatttcttgccttctgcatgcttttgaatgtgtttgctcttgattctctggttctttcaattgtgatgttagggtgtcaattttagatctttcctgctttctcttgtgggcatttagtgctataaatttccctctacacactgctttgaatgtgtcccagagattctggtatgttgtgtctttgttctcattggtttcaaagaacctctttatttctgccttcattttgttatgtacccagtagtcattcaggagcatatttttcagtttccatgtagttgagcggttttgagtgagtttcttaatcctgagttctagtttgattgcactgtgagaaacaatttgttataatttctgttgttttacatttgctgaggagtacttcacttccaactaagtggtcaattttggaataagtgtggtgtggtgctgagaagaatgtatattctgttgatttggggtggagagttctatagatgtctattaggtctgcttggtgcagagctgagttcaattcctggatatccttgttaactgtctgtctcgttgatctgtctaatgttgacagtggggtgttaaagtctcccattattattgtgtgggagtctaagtctctttctagtcactaaggacttgctttatgaatctgggtgctcctgtattgggtgcatatatatttaggatagttagctcttcttgttgaattgatccctttaccattatgtaatggccttctttgtctcttttaatctttgttggtttaaagtctgttttatcagagactaggattgcaacctctgcctttttctgttttccatctgcttggtaggtcttccttcatccctttattttgagcctatgtgtgtctctgcacatgaggtgggtttcctgaatacagcacactgatgggtcttgactctttatccagtttgctagtctgtgtcttttaattggagcatttagcccatttacatttaaggttaatattgttatatgtgaatttgatcctgtcattatgatattagctggttattttgctcattagttgatgcagtttcttcctagccttgatggtctttacaatttggcttgtttttgcagtggctgttaccagttgttcctttccatgtttagtgcttccttcaagagctcttgtagggcaggcctggtggtgacaaaatctctcagcatttgcttgtctgtataatattttatttctccttcacttatgaagcttagtttggctggatatgaaattctggcttgaaaattcttttctttaagaatgttgaatattggtccccactctcttctggcttatagagtttctgccgagagatcagctcttcgtctgatgatgggcttgcctttgtgggtaacccgacctttctctctggctgcccttaacattttttccttgatttcaactttggtgaatctgacaattatgtgtcttggagtcgctcttctcgaggagtatctttgtggtgttctctatatttcctgaatttgagtgttggcctgccttgctagattggggaagttctcctggataatatcctgcagagtgttttccaacttggttgcgttctcctcgtcactttcaggtccaccaatcagatgtagatttggtcttttcacatagtcccatatttcttggaggctttgttcgtttctttgtattcttttttctctaaacttctcttctcacttcatttcattctttcatcttccatcgctgataccctttcttccagttgatcacgtcggctactgaggccttgtgcatttgtcacgtagttcctgtgccatggctttcagctccctcaggtcctttaaggacttctctgcattggttattctagttagccattcatctaatattttttcaaggtttttaacttctttgccatgggttcgaacttcctcctttagcttggagtagtttgatcttttgaagccttcttctgtcagctcatcaaagtcattctccatccagctttgttccattgctggtgaggagctgtgttcctttggaggaggagaggcgctccgatttttagcgtttccagtttttctgcactgttttttccccatgttggtggttttatctacctttggtctttgatgatggtgatgtacagatgggtttttggtgtggatgtcctttctgtttgctagttttccttctgacagtgaggaccctcagctacaggtctgttggattttgctggagttccactgcagaccctgtttgcctgggtatcaggagcagtggctgcagaacagcgcctattggtgaattgcaaatgctgctgcctgatcgttcctctggaagttctgtcttggaggagtacccagtcgtgtgaggtgtcagtccgcccctacaggggggtgcctcccatttaggctactcgggggtcagggacccaacttgaggaggcagtctgcctgttctcagatctcaagctgcatgctgggagaactactactctcttcaaggctgtcagaaagggacatttaagtctgcagaggtttctcctgccttttgtttgtctgtgccctgcccccagaggtggagtctacagaggcaggcaagcctccttgagctgtggtgggctccacccagttcgagcttcccggcggctttgtttacctactcaagcctcggcaatggcggacaccccacccccagcctcgctgccaccttgcagtttgatctcagactgctgtgctagcaatgagcgaggctctgtgggcatgggaccctcccagccatgcgcgggatataatctcccagtgtgccatttgttaagcccattgtaagagtgtggtattagggtgggagtgacccgattttccaggtgccgtctgtcacccctttctttgactaggaaggggaattccctgacccctttcacttcccgggtgaggtgatgcctcaccctgcttcggctcactcacggtgcactgcacccactgtcctgcacccactgtccagcactccccagtgagatgaacctagtacctcagttggaaatgcagaaatcacccgtcttcttcatcgctcacactgggagctgtagactggagctgttcctatttggtcatcttggctcaaaaaccttgcccttgctctagagccactggagggggaagggccaagtgccagctgctctggcatgccagcatcactattcccaagtcacatgtggttggaaagcatcatactagatgaccacacaactgcctggggatcagggcacaacaataaggcaccaactgccctcaaactagactttgtttacatttgtgaagtctctccaaacatcctgcaggacatttatttgtaaacatccaaggctaggtctgtggtaacaatgccaaggcatttgctgtcaaggctgaaggacactgctaaactttctgactgagaaactttctttctggatgattgaacatgtggttgttttcaggtcttcaaaagataacctgaaaatgaatgaaaaggaacttcttgaaaggtttagggagaagaaggacatctcaggtggaagttcctctatggatggaacagaatgaatatacttggttttgctgaaataaacaagcaaacaaaactaaagtaaaagtgcctcctagatctcagtggcttaacacaaaagtctgcttccagcccctgctgcttgcacactgtgggtcagcaggaggccctgcagagtgaggtcactcctggaactaggctggcagagactttatctgttcacaggctgccacagtcaccttggcaaggaaagggagtatggcaaaccaggccctgaggtgcttcaggctcctgcggggaagcgacacacctcattttcacttacattttactcttcaagtcacatggtcacacacgtttaagtggccggtgaaatgtgttacttccatatttccagagaaagacttggaaatatttgtggccagcaccataacacagcagctctaggagttttcccacaacacagcacctctaggaaacgcctcttcattctggtattttggttgccaacacagcaacagctccctgcacccagcagaaagccaatcctgagagtaagcaaaccctgcgcatccccacgggagaccacccagctgcagcctcctggttcttgaaggagagtctgcaacacaaatgagaaaaaccaagatgaactgaaaaaaaaaaaaaaaagactaacgagaaaaagtaactcaaataatataagttctctaataactatttgtagaaagatttaagatgatatcgtagccacaaaacaagaacagaatgccatgggaaggaacaatcagaaaacaaaaaagagatctcaaaaattaaaaatatgactatcagaccagcctgagcaacatggcgaaaccctgcctctacaaaaaatacaaaaaaatcaggtagacacggtggtgtgtgcctgaagtccccactactcaggaagcgggggcaggaggattgcatgagctggggtgggggtgcagaggttacagttagctgagatcacgccactgcactccatcctgggcaacagactgagaccctgtctcaaaaaaaaaaaaagactatcaaaaccatgcaataaggccaggcacggtggctcacgcctgtaatcccagcactttgggaggccaaggtgggtggatcatgaggtcaagagatggagaccatcctggctaacatggtaaaaccccatctctaccaaaaatacaaaaattagctgggcgtggtggcacgtgcctgtagtcccagctactcgggaggccgaggcaggagaatcgcttgaacccaggaggcgaaggttgcagtgagccaagattgcaccgctgcactccagcctgggcaacagaagcaagactcttggtctcaaagaaaacaaaaaaatcaataaaagcaaagaaacaacagatgatagactgatagactgacaatttttgcaacatgtctagtaagtaaagagtctgagtccaaatattatcaaattatagtaatatatgttatggacattttttaaactactgcatcataactaaataaaagatggtagaaaaatgggcaaagcttaagaacaaggccattaactgaaaagggaaaacaaatggtcaataagtgtataggacgctgagccttgttggttatcagggaaatgcaaattcaacttatgacaacatcttttcaccaaatggattagcaaatactaagaagattgattttgtcaagtatttagaaatctttgagtaaacgtttactctcgtatagtgttggttggcttaaatagtatttaaaccaaggtcaactaagcagcacctgtgtttgtctcagtgattctcacagtagctgacctggtaggacattatatctatgcataagaagacatgtacaaagccattcatagaagtattgtttcttttctaagcagctttataaagatagaattcacatgccatataattcacccatttaaagtgtgcgattgaatgagttttagcacaaggtcatgcagccatgtattagggttctgtagaggagatacacacatacatatatatgggagtttattaagtagtgtgtgtgtatgtatgtgtgcatatatatataggggagtttattaagtattaacttacgtaatcacaacatcccacaataggctgtccgcaagctgaggagcaaggagagccagtcccagtcccaaaactgaagaacttggggtctgatgttccagggcaggaagcatctagcacaggagaaagatgtaggctgggagcctaggcccacctctccttttcatgtttttctgcctgctttgtatttgctggcagctgattagattgtgcccaccagattaagggtggatctgccttccccagccccctgacccaaatgttaaactcttttggcaacaccctcacagacacatccaggatcaatactttgtatcctttaatctaatcaagttgacactcagtatcaaccatcacaagtccaccccaagtcaacttgaacccatacacatctcctgagaacacacatagtcttcaaataaagacaataataaggtcataattacccctaacatactacagctatccttcgtacaaccagaaatacaccaatccccaacccaaatactattacataaagttaacaatacttaacatgctgatatgaagtcaataaatgttatgtcacatgataaaggaaaaggaaatatactttcttagtacaagtgtatacatgcacaaacatgtttttagcaaaaaaaggaggaaataattacagacttcatttctgcagctggtcacatggttgtagctggtatcgataactacctttttctactacccgttctgtattccctttgccttcagcaagcacctcagcaagacgtgggttttttcttggtggagtgacccaaaccttcattcctgaatggtctgggtcatttgtagtcctgcctggattgggctgttgtagtttcccattgaccttagtcacagggcatggtgatactaagagacgccctaatggatctcctgtattccatgcatactcttccttacctcctttgtggagtagtagactgatttcatcttgatagtccaggtcagtcaccccagtcaacactgtaactcccttcttggcctgttgacttaaaggtgggaggagcccaaagtgtccaggtgggtaccaatcttccagtttaatggaatcattgtgtctcctggtggcagcatttctccctctggaactaagatctccaggccagcagaatgtaatgtcgggggaacaggaagcaaaaattttgctaggggatcactaggggtgatggtgagtggtgtcagttcagtttcaccccttgattcctggaccgtgaatcctggctatgggagaaacagtaccgtatattggatgctaattcagaacatatacggcctgctggagaactttgcctcagccctgcaaagtgttgtcacctagttggcattgtaattgtgacttcaaaaggccattccaccgttctttgcagcctcttcaggatgatggagaacatggtaagaccagtgaattccatgagcataagcccactgccacacctctttagctgtaaagtgagtgccttggtcagaggcagtgctgtgtggaataccatgatggtggataaggcattccgagactccacggatggtagtcttggcagaagcatttcgtgcaggataggcaaacccatatccggagtaagtgtctattccagtgaggacaaaccactgccgtttccatgatggaaaaggtacaatataatcaacttgccaccaggttgctggctgatcaccccaaggaatggtgccatatcaccacagtcattcccaaaagaaaccccatgcttggtagcagtcattccccatctccctcttaagccctaggtaaccactcatctaatgtctgtatctacaaatttgcctatctggacatttcatgtaaatggagtagtataatacgtggtccttcctgacaggcttttttcccttagcatagtattttcaagtcatgcatgttgtcacatacatcaatgtttctttttattgccaaatactattccattgtttggagatatcacattgtataaatacagtcattggttgattggtatttggattgtttccacttttttggctgttaggaataatgctgatataaacttttgtgtacgagttaccatgtggacatgttttcatttcccttgtgtatatacctgggaatggaattggtgagtgagaattctgtgtttaacttttggagtagctgccaaactcttttccaaagtggcggcaccactttacgtttctggtagcagtgaatgaaggctactgtttctccatgttctctccaacttactgttttttgttagagtcatcctagtgggtacaatgtggtatgtccttgtggttttggtttgcacttccctaatgactaatatatcattagcatctttttatttgcttatggattgttcatatatcttttttgcggaagtgcctgttaaaatcctttgcccatttttaaattggattgtcattttcttgtcgagctgcaagctttctttatatattctggatgcagttcctttatcagacaaatgctttgcacagattttctcccagtgtatgagttggcttttcactctcttgatggtatcttttgaaacacaggttttcagttttgatgcaatccagttaaactattttttcttttgttgcgtgtgcttttgctgctgtgtctaagaaactattgcctaattcaaggtcatgaagatttacccctatgttttcttccaagaggtttctagttttagctctgatatttacatctgtgatccattttttagttaatttttttgtatggtctgaaataggtgtacaacttcatcctttcgcatatggatatccagttgtcccaacactgttggttgaagactgttctttccccgatgaatattcttggcacctttgtttaaaaaaaaattgttttctggactctatattccattgttagaaacgactgtccttatgccattaccttgctgtcttgattgctacagatagctagaaagttttggaatcaggaaatctgagttcttcaacttcttttgaagtattactttggctattctgggtctgttgcattttcatctgaattttaggaacagcttgtcatttttcgcaaaaaaaaaaaaaagctgggatttttttatagggattacgttgaatctgtagaccaatttgtgaagcagttacattttttacaatgtcatctgatccaagaatataaaatatctttccatttatttagatatttgttaatacctttcagcaatgtattgtagtcttcatcttacaaaccctccaggtctttttttaatgtattcctaagtgtttctttttgatgctacttaaattgaattgtttttaaatttcattttccaactgttcattgctaacatatagaaatgcagttgatttttatatattggccttgtatcctgcaatcttactgaatctgtcatataggttttttaatggattccttgggattttctgtatataagattttagcatctgcaaatagagataattttacttcttctttccaatctgtatgctttatatttcttttccttgcctagttgccctagatagaactcccagtacagtgttgaatgggagtagcaggacgtccttgtcttgttccttatcttaggggacaagcatttagtatttcaccattaaatatgctgttagctgtggagttttgtagatgccctttatcaggttgagcatgctcccttctattcctagtttgttgagtatttttatcaggaaggagtgttgaaatttgtcaaatgcttttcctgcacctattgagatgatcttgtggattttgctccttattaacatggaggattatattgattgattttttttttttttttgagagggagtctcactctgttgcccaggctggagtgcagttgcacaatctcggatcactgcaacccttgcccaccgggttcaagcgattctcgtgcctcagcctcctgagtagctgggattacaggcacgcaccaccatgccaggctaatttttttttttttttttttttttttttttgtggtagagatagggtttcaccatgttggccaggctggttgcaaactcctggcctcaagtgttccacctgtctcagcctcccaaactgctgggattacaggggttagccagtgtgcccagtctgatttttccatatgttaaaccaagcttgagtcctagcataaatcatatttgatcataatgtagaatcctttttatatgtggctggattgggcttgctagtattttgtggaggggttttctgtgcatattcatatatgatacagtgttgtttcttatagtgaaaattttgaaacaacctaaatgtccattagtaggtgagtagatatataaacttcatagcgatttaagcaaaaaaatagagctatacataataacatacatgatctctgagacatgtttttaaaaattgcaaatgtagtatgatataatattgagttactcctaacatagaattgagacaaatgtaaatatgaaaatactatgctatgtttttgtttgtgtagtattaaacttcttccagtgagaaagtatactcaagtgtatttgtataaattcaaaatatataaattgttttttaaaaggaaaatgacaatgaacacactgatatcaataaatctatgtcctaacgaatttcactgtaaaccaaggaaagtcctgttagcctacaacactgtgctatttctccctaccacacctactgcaagcagtcagtatgattagaacttgtctcactttaaaatttgaaataaatttaccagcacaggatctatacaagtatccagcaataggaaaaagataaaggggacaaggaaaacatatgactttttaaaaatcttggcaaaatcttaccaaggaaaagatgaaaattgtgacccagagttactgccataaatttcagaaattgatcaacagtagccttgataaaataggaactcataggccaggcacaatggctcacgcctgtaaccccagcactttgggaggccggggcaggtggatcacctgaggtcaggagttccagaccagcctgcccaacatagtgcaaccccatctctactaaaaatacaaaaattagctgtgcatggtggtgggcgcctgtaatcccagctactaaggaagctgaggtaggagaattgcttgaacccggaaggtggaggttgcattgagctgagatcacggcactgtgctccagcctaggcaacagagcaaaactccatctcgaaaacaaaaaaaaagaaagaaaataagaattcatagctaagatacaaaacctcaagaaagaaacagtgatacaatgaagcaagaaagagagatgaaacgtgacttagcagaattgaggacatacgtaggagaggtcactgaatccatcacagaaaccaggtctacgtggaagcagacagagaaaatcagcactatgagagtgcagtaagaaacctggaggacaggattgagaaaaacagcagtggaaaatggaaataaacaaaaagtcccaggataaaagatcaaatgagcactgcagaaggcaaaggagacaaatgtatatactttgatatcccccccaaaagaaaaccaagcaaatagatcagaaaaaagatatgtgtacagataatatagccttgtatcccaggaaaagttggcacaaagctatgaatagcctaatagttattagacattaaaggtaagactcttttgagcatcccatctaaattttagagaacctaataatagggcagtaaccagcagtcctcagacttctccacggtcacattttatggagccactcatacaacagcctcagagaaagcaagtatgacctcaacatgttacagcagccaaattgacattcaaggataaggacaatgaacagttattttttgctgtacagtatcatatttcagaaaatggaattcccataagcccatctcaaagggaacacatttgagaccagcaagaatttattagagaaactggcagaaaaatgcataacaaacattaaattcctttttaggatgaaaactaaaacaactataggaattaccttagagagtaaaaagtaaatatgacaaactaatacaatgtcaaaatgatataataaaagttgaaatgggatgtgagaaagtaggatgcaccataattattctcatttccttattttgtaatatccagggacaaaattgcatctcataagttacacaatagaagtataaatatacgggcctatggaagaacattaaataaaacaaaaataacaactagaatttattggtaggggacaggatgaagaaatccaactaaatagtatacagctccactgttttctcatttaatgaaccaaatgggggtaggaaagtacaaatatgtaaaataatagagaatagggaaataaagtatagaggaaattaataagtcataagagattacattgctcggttctgtaaataagtttaaaacctgtttgaaatgaatgattgaaaaaatttcccaatcgtgcctctatataaaatcaacacagataagttattatagaagcatagaaatactcctaattaaagcaagaataatactgataccaaaaccgaatccaacaaaggaagcataagaacaattacagagcattcttaggaataattttgcaaaagttctaaatataatattagcaaacaattcagcagcatattaaaataatatgctatcaccaagtgaggtttattctgagatgggaagatggttttatattagaaaatatattaatataattatactgttaatagaacaaggtgtgagagcaagaggaaactatgcccttagatgctgaaagagcatgcagtaaaattcaacctttattcctaacaaaactcttcatatgagaataatgtatatgtctttaatatgattatattatgcataaaatatgttatatatgagatgttattatacactctatataaccgtaagcccgcattatattcaacagcaaaacactgtaagcattcttgttgtaataaaaaacaaaacaaaggtgtacattctctccaggaatatttgacatttttctgatggtgctcaccaatgcatttagaaaagaaaaatgactacggccgcaccgccccaaatgtgtctgatcttgtctgatctcagaagctaagcaaggtcaggtctggttagtacttggatgggtgagaaatatatatgtttataccataaacagttcaaaagagtaaaactattactgtggtagatattattgtgatattattatttatcttgaaaacctaagagaattaaccttgaaaatatgacatattataaaaggattcaggaagttgggtacaaaattaatacatagaaatcagttgcctttttttaattatactttaagttttagggtacatgtgcacaacgtgcaggtttgttacatatgtatacatgtgccatgttggtgtgctgcacccatcaactcgttatttaacattaggtatatctcctaatgctatccctccccccctccccccaccccacaacagtccccagtgtgtgatgttccccttcctgtatccatgtgttctcattgttcaattcccacctatgagtgagaacatgcggtgtttggttttttgtccttgtgatagtttgttgagaatgatggtttccagcttcatccatgtccctacaaaggacatgaactcatcattttttatggctgcatagtattccatggtgtatatgtgccacatttttttaatccagtctatcattattggacatttgggttggttccaagtctttgctattgtgaatagtgccgcaataaacatacgtgtgcatgtgtctttataacagcatgatttataatcctttgggtatacacccagtaatgggatggctgggtcagatggtatttctagttcaagatctctgaggaatcgccacactgacttccacaatggttgaactagtttacagtcctaccagcagtgtaaaagtgttcctatttctccacatcctctccagcacctgttgtttcctgactttttaatgattgccattctaactggtgtgagatggtatctcattgtggttttgatttgcatttctctgatggccactgatggtgagcattttttcacgtgtctgttggctgcataaatgtcttcttttgagaagtgtctgttcatatcctttgcccactttttgatggggctgtttgtttttttcttgtagatttgagttcattgtagattctggatattagccctttgtcagatgagtagattacaaaaattttctcccattctgcaggttgcctgttcactctgatggtagtttcttttgctttgcagaagccctatactttaattttgtcaattttgtcccatttgtcaattttggcttttgttgccattgcttttggtgttttagacatgaagtccttccccatgcttatgtcctgaatggtattgcctaggttttcttctagggtttttatggttttagatctaacatttaagtctttaatccatcttgaattaatttttgtataaggtgtaaggaggggatccagtttcagctttctacatatggctagccagttttcccgccaccatttattaaatagggaatcctttccccattgcttgtttttgtcaggtttgtcaaagatcagatggctgtagatgtgcagtattatttctgagggctctgttctattccattggtctatagctctgttttggtaccagtaccatgctgttttggttactgtagccttgtagtatagtttgaagtcaggtagcgtgatgcctccagctttgttcttttggcttaggattgacttggcaatgcgggctcttttttggttccataggaactttaaagtagttttttccaattctgtgaagaaagtcattggtagcttgatggggatggcattgaatctataaattaccttgggcagtatggccattttcatgatattgattcttcctacccatgagcatggaatgttcttccatttgtttgtatcctcttttatttcattgagcagtggtttgtagttctccttgaagaggtccttcacatcccttgtaagttggattcctaggtattttattctctttgaagcaattgtgaatgggagttcactcatgatttggctctctgtttatctgttactggtgtataagaaagactgtgatttttgcacattgattttgtatcctcagactttgcggaagttgcctatcagctcaaggagattttgggctgagatggtggggttttctagatatacagtcatgtcatctgcaaacagggacaatttgacttcctcttttcctaattgaataccctttatttccttctcctgcctgactgccctggccagaacttccaacactatgttgaataggagtggcgagagagggcatccctgtcttgtgccagttttcaaagggaatgcttccagtttttgcccattcggtatgatattggctatgggtttgtcataaatagctcttattattttgagatacctatcaatacctaatttattgagagtttttagcatgaagagttgttgaattttgtcaaaggccttttctgcatctattgagataatcatgtggtttttgtctttggttctgttttcatgatggattacgtttattgatttgcatatgttgaaccagccttgcatcctagggatgaagccaacttgattgtggtggataagctttttgatgggtaagcttcttgatgtgctgctgcattcggtttgccagtattttattgaggatttttgcatcaatgttcatcagggatattggtctaaaattctctttttttgttgtgtctctgccaggctttggtatcaggatgatgctggcctcataaaatgagttagggaggattccctctttttctattgattggaatagtttcagaaggaatggtaccagctcctccttgtacctctggtagaattcggctgtgaatccatctggtcctggactttttttggttgataagctattaattattgcctcaatttctgagcctgttattggtctattcagagattcaacttcttcctggtttagtcttgggagggagtatgtgttaaggaatttatccatttcttctagattttctagtttatttgcatagaggtgtttatggtatctctgatggcagtttgtatttctgtgggatcagtggtgatatctgctttatcattttttattgcatctatttgattcttgtctcttttcttctttattagtcttgctagtggtctgtcaattttgttgatcttttcaaaaatccatctcctggattcatggattttttgaagggttttttgtgtctctatttccttcagttctgctctgatcttagttatttcttgccttctgctagcttttgaatgtgtttgctcttgcttctctagttcttttaattgtgatgttagggtgtcaattttagatctttcctgctttctcttgtgggcatttagtgctataaatttccctctacacactgctttaaatgtgtcccagagattctggtatgttgtgtctttgttctcgttggtgtcaaagaacatctttatttctgccttcatttcgttatgtacccagtagtcattcaggagcaggttgttcagtttccatgtagttgagcagttttgagtgagtttcttaatcctgagttctagtttgattgcaccgtggtctgagagacagtttgttataatttctattgttttacatttgctgaggagtactttacttccaactaagtggtcaattttggaataagtgtggtgtggtgctgagaagaatgtatattctgttgatttggggtggagagttctatagatgtctattaggtccacttggtgcagagctgagttcaattcctggatatccttgttaactttctgactcgttgatctgtctaatgttgacagtggggtgttaaagtctcccattattattgtgtgggagtctaagtctctttgtaggtcactcaggacttgctttatgaatctgggtgctcctgtattgggtgcatatatatttagtatagttagctcttcttgttgaattgatccctttaccattatgtaatggccttctttgtctcttttgatctttgttggattaaagtctgttttatcagactaggattgcaacccctgcctttttttgttttccatttgcttggtagatcttcctccatccttttattttgagcctatgtgtgtctctgcacatgagatggatttcctgaatacagcacactgatgggtcttgactctttatccagtttgctagtctgtgtcttttaattggagcatttagcccatttacatttaaggttaatattgttatatgtgaatttgatcctgtcattatgatgttaactggatattttgctcgttagttggtgcagtttcttcctagccttgatggtctttacaatttggcttgtttttgcagtggctgttaccagttgttcctttccatgtttagtgcttccttcaggagctcttgtagggcaggcctggtggtgacaaaatctctcagcatttgcttgtctgtatagtattttatttctccttcacttatgaagcttagtttggctggatatgaaattctgggttgaaaattcctttctttaagaatgttgaatattggcccccactctcttctggcttgtagagtttctgccaagagatccactgttagtctgatgggcttccctttgtgggtaacctgacctttctctctggctgcccttaacattttttccttgatttcaactttggtgaatctgacaattatgtgtcttggagttactcttctcaaggagtatctttgtggatttctctgtatttcctgaatttgagtgttggcctgccttgctagattggggaagttctcctgtataatatcctgcagagtgttttccaacttggctccattctccccgtcactttcaggtacaccaatcagaagtagatttggtcttttcacatagtcccatatttcttggaggctttgttcatttctttttattcttttttctctaaacttctcttctcgcttcattttattcatttcatcttccattgctgataccctttcttccagttgaccgaatcagctactgaggcttctgcattcgtcacgtagttctcatggcttggttttcagctccctcaggtcctttaaggacttctctgcattggttattctagttagccattcatgtaatcttttttcaaggtttttaacttctatgccataggtttcaacttcctcctttagctcggagtagtttgatcatctgaagccttcttctctcagcttatcattctctgtccctttgttcccttgctggtgaggagctgcgttcctttggaggaggagaggtgctctgatttttagagtttccagtttttctgctctgtttttccccatgtttgtggttttatctacctttggtctttgatgatggtgacatacagatggggttttggtgtggatatcctttctgtttgttagttttccttctaacagtcaggaccctcagctacaggtctgttggattttgctggaggtccactccagaccctgttggcctgggtatcagcagcagaggctgcagaacaacggatattggtgaacagcagatgttgctgcctgatcgttcctctggaagttttgtctcagagggatacccagctgtgtgaggtgtcagtctgcccctactggggggtgcctcccaattaggctactcaggggtcagggacccacttgaggaggcagtctctctgttcgcagatgtccagctgtgtgctgggagaaccactactctcttcaaggctgtcagaaagggacatttaagtctgcagaggttactgctgccttttgtttggctatgccctgccctgagaggtggagtctacagaggaaggcaggcctccttgagctgcggtgggctccacccagttcgagcttcccggtggctttgtttacctactcaagcctggacaatggcgggcgcccctcccccagcctcactgccgccttgcagtttgatctcagactgctgtgctagcaatgagcgaggctccgtgggtgtaggaccctccgagacatgcgcaggatataatctcctggcgtgccgtttgctaagaccgttggaaaagcacagtattagggtgggagtgacccgattttccaggtgccatctgtcacccctttctttgactaggaaagggaattccctgaccccttgcgcttcccgggtgatgggatgcctcgccctgcttcagctcacgctcagtgcactgcacccactgtcctgcacccactttccgacactccccagtgagatgaacccggtacctcagttggaaatgcagaaatcacctgtcttctgtgtcactcacactgggagctgtagactggagctgttcctattcggccatcttggctcttttttttccagttgcattttttgtacaaattaataaacggttaaaagataaaaggtaggaaacaatccaagggattgatctgatctgacctgggaagcacaaagtcatccaagcagggtaaataaaagataagtgctgcagaagacaaaagagataaacatatgtactctgatgttcaaaagaaaaccaaatagatcagaaaaaaaaaatgtgtactaataatatagctttgtgtcccaagaaaggttgacacaaaactatgagtagtctaatagttcttagacgttaaaggtaaaatgtgactggaaaaatttgacaactggtatttccctgttatccgtgcttagaaatgtcatggtgaaactgcagaacaccaaggaatattgctgagacagataggctacttagaaaggaacgacacttagaatgatggctgccttctcaatatcataagggaagacagtggaaaagtgtatttcaagtgttgaaggaatattgctgagacagatgggccacttagaaaggaacgacacttagaatgatggctgccttctcaatatcataagggaagacagtggaaaagtgtatttcaagtgttgaaggaatattgctgagacagatgggccacttagaaaggaacgacacttagaaggatggctgccttctcaatatcataagggaagacagcggaaaagtgtatttcaagcgttgaaggaatactgctgagacagaaaggaacgacacttagaaggatggctgccctctcaatatcataagggaagacagcggaaaagtgtatttcaagcgttgaaggaatattgctgagacagaaaggaaggacacttagaaggatggctgccctctcaatatcataagggaagacagcggaaaagtgtatttcaagcgttgaaggaatattgctgagacagaaaggaaggacacttagaatgatggctgccctctcaatatcataagggaagacagcggaaaagtgtatttcaagtgttgaaggaatactgctgagacagatgggccacttagaaaggaacgacacgtagaaggatggttgccttctctgtatcataagggaagacagtggaaaaatgtatttcaagtgttaaaggacaataacaaccaatttagaatcaaatgcccaagaacaccatttctcaaagccaagagaatgtcaatgaagacatttatagataaagccagagagtttacaacaaccaagagacctacactaaaggaccttcacatggatttaaggaagaaaaaaagatatcagaagaatggtctgatgtggggaagaaatggtgagaaaaaaatgataaatgtttatgtaaaactaagcaaacaccacatgtatgaaataatttaaaaaaaaaaatctaagacgtgtatccatatgccatctaagccctgacaagcgtgatcacagttcaactctgagttcttggtatggtttgggagaaaaacagtatgatgatttcagtagatgcacaaaaacattttattaactttaatacctcttcatgataaaagctattagcacactaagtattcaaaaagagaatgtccccacgtgtgtttattgcagcactgtttacaatagcaaagacttggaaccaacccaaatgcccatcaatgatagactggataaagaaaatgtggcacatgtacaccatggaatactatgcagccataaaaaagaatgagttcatgtcctttgcagtcacatggatgaagctggaaaccatcattttcagcaaactaacacaaaaacagaaaaccaaacaccgcatgttctcactcataagtgggagttgaacaatgagaattcatggatacagagaggggaacatcacatacaccccccagcctgttgaggggtgggggaaaaggggagggagagcattaggacaaatacctaatgcatgcagggcttaaaaccgaggtgatgggttgacgggtgcagcaaaccaccatggcacatgtatacatatgtaacaaacctgcacattcagcacatgtatcccagaacttaaagtaaaatttaaacaagagaatgtccctaacctgatagattaatgatacctatcctgttctcacagtaacaatctttttcggtgggaaaacttcggaagcactcctatgacatcatgaattacacgagtatgccgcaatagcattttgcatacaatgtggttttgtaaattgcaaccagaatagtgaaagaagaaactaaaggcataaagactagaaaggaagaaacagaactgtcatattagcagatgtagagttagctacatagaaactcagccaaaatatagaaattattatagtttaaaaatgtagctggctacagaacacctcatatagcctatagatcaatatactttttgcttgatccttttataatttttgaattttgtaccttatacatacattacctagcaaaactaattattttgaagttgtcactgatcttttaaaagtacatataatattcttttcacataaaatgatatatgtatgtttatatgcattaagaggtgttgaaaaggctggtcaccaaaatattactttcttggggtaattttctcattgtgatgtggtataggtcaattctggttttctgctgtatgttgtttgaacttttgtatactatttttattataaaaataaatccattttattgtgagaaaatgaatgaataaataaacccctcaaaataggtatttccatgatttccacatagttgaacctagaaatctctaattttttacagctccgctcatgattctggtgatcacattgggaacaacagggctaggatttgtaatctaagttgagatcctcatctgaatcgcagaaacaaacgcctaatacgcttgtctaaatcccaaataaaaatcaaaccaaaattattaccagcctacgtttcagaatctcaccgtcatgttaggctcacttactggcaatcaccctattaaccaggcattagccagttgccagcttctgccctggcagcttccgtcatgttttccctgagtcttcacttcctacctgccgtcctggccccctactctgcttaaaaacatgcaaggaaatggacaaaactatacaagtgaaatggccaaaggtggtggaagcaagaaacggtgcaccgtgtgttaaggcaatactgtagtttcgtcatagggtaaattgcttggtttctgctgtcatcccacggatgttcagggaaagttcaaaatacaacaaagagcaaaaggccctccagcagatgaatgagaccagggccactattcactgatgcaccagggaggtgccattctcgcagaataccaggctatattcttttgctatggtttccgtaacaaagtgccgcaaactaggtggcataagcaccagaaacttactgtcttttggttctggagttgagaaatctgagatcaaggtgtcagcagggttggttccttctgcaggtcacgagggaggatctgttccatgcttcttgcctaacttctggtggtttgctggcagtctgtggcgttccttggctgctttgtagaagcatcacttcatctctgccttcatgttctcgcgacattctccctatgtgcatgtctgtttccaaacttcccctttttataaggacatcagtcattttggattaggcctacctactccaggatgacctcatcttaatatgtctgcagtggtcacatgctgatgttctggttgaagggggggcccagttagaacttcaacatacgaatttggaggagggggacaccactcaacctgaaacacgtgcaaatcctgctctctggaaatggggccactgggaggtcctggccttaggagagcctccttcttctgcgccagccctccatttctgaagccactgtggggggcttggtagctagattttggccgggggatgctgcacggcctctggtgcagggtggaggtgtggtttacttctgtgtcgtttgttgctacaggttatatcgaagctgccgtcattcctgctggagctcggaggatccgtgtggtggaggataaacctgcccacagctttctgggtaaaacacaaatgacttgactcaccatttatgtgttgagaatcgattttgatgatcagtctggtaaattggttcagtgtcattcctcccgggttatggctggtttcacgcctgtgttgtaatgacatgagcacccagaggggaccacacagtgctgtcatatttgactaacatgcagccacccccatggtggattaggggcgggaacaggaaggaaaatgatggaagacaagcttgggacaggaaggaggatcatagaagagtgaaggaagttgtgaggaattggggcaggttaccagtcccccaaagtaaccccaggagagctgagagcagcttgagtctgagcagtgcaggccattggccaacttgcaggaagccccattgggctgccagtggctctggggatgacttcttagctggaaaaagaacaacaatcttaagtctaatggaaacccagaaggataccaatttcactaaggtctgtgtatcccaaattcctagtggccagctccattgacttcaagcacaaacacctgcatctttccgtagacttgggttctattctggactagttttcctaactatgcaggagcaaagccattctgataaatcccttcctagccagagaagaccttctgagggtatccttggcccaattcccagacgaccccagcaaaggtcagcccaggacttgagccccaaggtggttggagttctcagttggacacagaagtggagacagcagggtgcccagagggtgcctctgctcctaccttcctggcttggaacatgctgtggcccctgcccttctgccagctttaatcccatgttcctgtcttgggttaaacttaaactcaaggtggctgatcttcctcaggcacccctcttctgagctgttttcatgtcatcatctctcagcctgtgttgcaaagtgctgattgagactgaagaaagaaaaagtaagacatgatttgtctagtttcaaaaatgattttagctaaatcgaagttacccatgaaacccttttatttccatttttatcactgattttttaaaatgacatctttgtctacattcctgcctttatagactatgcaaaagtcggagtctttctttgaaatggtctctgcttgagagactcaaagtctaatgagacagacacaaaacaaatctctaataggcaagtttacaatgaagaccacagtcctgttgaagagttaggaaatgctttgacgctaagatgctcctcgcacacctgccttggggaaggcaggcatgcccatttccaagcacccacgtggggtatcactggcaccacactctgtggatccccccctgtcccaagctgccctgccacctcctcctagcttggtcacctgccatccaccctgcctccttgaggctgtgacggccgctcgtgcttctgctgccagggtaagaccttgacatccctggagttgacatccatgtgcattttcatcagccccatggtttttcacctcccctgcatggacagtgtccctgcctcgcctggcactctcctcctcagctgtcccagctgtcactctgcaaatagaacaacacttaaaaatgcattctaaaacaaggcctcttgctgcttttggcagcttcaaagtgacagcctctttttactaaattcgcaaagagcccactccctctcctgcccatcaaaggacattgggtcaacctcaccagcatttgcattggaagccccaccagctggtatcatgccaaaaagttacccttccccttcccaacccatgcatttgaatgtactggaggccctccgtgggatgctgatgttacctttcatcctaattcaaaattcgcagtctgggtattccaagaggtactcagtttggaggtcgaagtagtggttcttccatcaagcccagaaggtgtccctgcgagtaagtcccttggcttccgaccccggcttctgagatttcccagcatggctgctccgcctggctcagccctgagtgtctggcgataggagtgtcttcctaatctccacttttgcatggtaattttagaatgacagaggatgttagaatcctttggatcactcctcaacttcccattcctgtggcacaaatggacctttcactcacattcactttaaggccaacaggtgctaactagcaggtgccacccaggagaaccagctcttgtgatcgtccctcagctcctgaagcctgagggccatgtatacaaaaaaagaacaatagcatccgcgatagtggctcccagtcacggagctcggctgtgccttggagagccgatccctaatctccctaaatgggctgcaaggtcttgctctgcttccttcttagaggggcaagctgaagcttcagggggcttggtgtctcatccagggtctccacctcctctgatttcgctgccgttcatggagcctctcagaattactctgtccaatcatggccagagactgccggatggagacttttcattggagaacacaagttaaacctgcctgttgttgccactacgttgtatgcacttcggaacaaacctgcatcccacggagattggtttaacgtcttggggtgactgctcagctctccagaagcagtgggcctccgtgggaggttggagccggcttcctgccttatcttacccagaaggcataatcccaggactccagggcctggctgatggattcgggcaagcctgaaggtggtccacactcattatgtttctaaagttagttcaaaaaggccttgtctccactcggggctgggtgctttggaagtcaacccagtgtaactttgaattactttgaattactctcacatttgctgggagcaattcctgaagaatttcaccccacctaccttcagcccacgctggctggctttctgctcaaaaccacctggaacaggaaatgcctgggcagtttgtatccatagctaagaacagagctggcagaactccgagtggaaataaaaggagctgacttgctgccaggtttagaagtaggttgactgtgggtcaggtcttccagtgaagctaggacggagagagactaaaagaaccccactcgggcttctgtgcagctccatgccagagaggggcatgtggacagggtcagagctcgcatctgcctccagccagctctgaaaaggagcagtgcccttccctcaggaatgcccccacctcgctccctggaatggctcatggtctttcccacagtgcctggaagaccaggatggtgtgtaagtgtccacagagaggaagaagggccagagaccgaaatggacgttctgcatgtaacctcacactccagctcattgcaaaggttttgttctgccctggtggcaaaggaaagtgtacccacccgtgtggtgccccacagaagtctaactgttgagagcttctgagcaaaacccacaaaagtgagcatagttatgttttgggtagtgatttaagacttccaatctctggcccaggcgaaatgagcaagggaaaatctccccagcaaaccagagcttcagaattcacagataaaatcaaatcactgggggagtcccctgttcttcactctgttaattgcccataaaatcaaagcattcgtaatcattttaattgccccatggagtgctttctgggtccaacaatatcctgatttcaagtgcacactaattaatctcaaaatacttagagacaaagggggcttggagatactcactgatgcccaaggtttgaggggacaggaacttgtagagcccaaaatgtatttaatttggaaggttgtctttcaggaaaaaaaatacattatgcatagggctgtggaaaggactcctccagaggtgcctggagctgcagcctcatgggcctcataggcctttgcagaccccactctgcagctaacgcaaggcaggagagcaacccaagctgccacagaaggggccaggaggtgacctgcattgtctctctggatttgacatggccccatgaagtcattgttcttgggactccacaatgaacctatttattcactgttaaaaatgatcttgacgtcccaaaggaatctctgaggctgacatctcttttgagggatgtcaggcgcgaacttctgattttagcaggaagttatgatttttcagatggaccacggcaaattgcaaatttggaatcttgctaagtgacaccaaagtgaaaaggttggaagtaacccctatgcctcctggctctgctgacctcctgctaataactctgcctgtgttttcctctccccgggagatacacaaatgcgtggctaggagcacgctgtcccgaggagaggcgtgcaggctctgagctggaaagctgcatttgcagtgcgccagaacttgcagccactgcggcgatggccacaggcagtgcgtgggcatgccaagtgtattctttctggggctgtgagagctgaccccaaacccacgcctggcctcaaacaagttgtgattgtgcaggagttctccaactcatcggctccagaccaggacctccaaagcaaagacaagcatcttcagaattcgttggagtgcccccacagctgtgtgtggcttgtgagagccaattagaggcatctcttccccactccttgttcactgatgccaggtggatagcaaaatctgtcatggtgagggtatttacactttgggaagcaaatacgccatgactctaggctattttccccagagaaccggctgccgctagcactctgttgtccagtatgttccttcccatcagcagttgagcttgcctgggtttgtccgtcagccgcagcctctttcgctttcctatcccacaattccttgaccatacccagtgactcctccgtggcctccagtagccctcttcctgacacctctcccacccattccgctacagacaagcaagaccccgctccggtgatcagaggatggcaggctccagggccctagtggctctatctccacctcgtgctgtagttgctgctgctgctgccgcccagtgtcgggcctccgatggcagaagcagggcttccccaggccagccgccacctctgtgcagcgtttctgaggatggtcttataaccgtctccaggtgtgccctcctgcccttttttgggccttttcactcttgacttcccagatgttttacttttggcatggaagtggggtagtttgtaggttgtcattcagagtcactttaaaacatctttaaaaaaagggcccgaggaatacataaacaaggccagtggagaaagagtcacctcctcaggagtgttagagctgggataggagggttagagccgggataggggtgttagagccgggataggggtgttagagccgggataggggtgttagagccgggataggagggttagagccgggataggggtgtcagagccgggataggagggtcagagctgggataggagtgttggagccggaataggggtgttggagctgggataggggtgttagagccgggataggagggttagagctgggatagaggtgttagtgctgggatatgggcagaggccctggagggagtttgaggcaggggtggagtgtgccaggccttctgcctctcaggggtactcagctgggtggtaaacatctggggcctatttataggaagctgtaatagtaattttctttcctcgcctgttctgccctcatcgtgattagcttttttttaacccaacctccaaaaagcatgtgtgaatgccaaacccagctctcagttgctgagcaccagcttcaggcactgctggatccaggggcttaaaatgatgtcacaggagaaacggtttctctccgcactggcactcctgcctgtcctctctgtggacatcttcctgtgggctggtagatccaggctcacatccagtctctgggaaaccctgtgggaagaaagctgccttttcctaaggtgaacaaaagtccccctgtttggggttgggtgatgggcctgtgcctggaactgtggggttcaatcccacgtgacgggagggaaaacatgttcccaggagaaaccctgggtaccattgcttaaagggagaaacagatgccgtgtcatgggcacagtgggtgttcacagaagcaacaaaccagggacgagcctggggccccagctcagggcagcccgtgttggagtctgtcactggcagggtgtggatatgggactcagccggtccgtgctggtggcccagcaaggaggagagcagctgcctggcttccctctggtctttgtgagagaaatgggttctacggagcaggccctggtgtggctgtggtcagcacacagcttcaaagaaatcatttgctcatctctgtctcctttgtacagggcacctcagcatgcctgggtgtcctctatcctcacagtgagccccttccttcttcccaccctctgaggccactctccctctcttgcctccttttcccagccaaacctctgaaaagtggaaaaaactttaccttccacttgcttctccatatggggtgctgtgccttcctccctccatcaccccgcccagaactgatcttagcagtcctggcctctgaggatcaggaatgaccgtcctgcctcacacactgcaggcagccacacaccactgagccacacactgcgggtggcgttgtctcctctccctgtcttacacgctcagctgaaagcgggcttatcccaggaagccttccccatctgccccgtcccacaacattcccaggccccggaggcaccttaccataaagcttgtgaaattgtgttgtgttcatcttttctctctctcccttccaaactgtgagctccctgggagcaagagctgtgtctgtctttagccagcagtgaggaggccctcaaaataggctgagggaatggcagggtacatctgctgttcccccaacttatgctttctgaggtgtttcttcaagcagaagtccccagaccccaggttgcggaccagcagtagtccatggtctgttaggaaccaggctgcacagcagcaggtgagtgccctgcgagcgagcatgaccgcctgagctgcgcctcctgtcagatcagaagtgggacattagattctcataggagcgcaaaccctattgtgaatggcacgtgcaagggatctgggttgtgcatgccttatgagaatctaatggctgatgatctgaggtggaaagtttcatcccaaaaccatcccccgccaccccacttcccccaaccccctggtctgtggaaaaattgccttccacgaaaccagtccctagtcccaaaaagcagtcctggggactgctgtcttaaaggactctggccccttggttttttctatctgctccttcccaccagcccacactggatcctaaaaccaaatagacacatgcatatgcaagagacaattttctaaacctgcagaaagcttgaaagaatgatgaacgtccatgcaccctttgcctatatttgcctatagttaatataaccaagtatgtatttgcattattagctcactagaagcattggaaatccgtgaaatcagtcactgttgtaagggtatatagaatatgaaaccctgtaacagagcgtagaatttgtcctttttgaaaacaggccttacctttgcacatttcagcattagtcataaaatctagactgatgctaaagaaatgggaattgaaagttgtcagagtgataagtgcagtagggttggtctgttggattcaggtctccactctacaactgaatagctttgtgattttgggcaaggtacttctctctgcccccattgcctcacccatgaagtgatgacaataattcagagggttgttgagaagattaaatgggtcagagtatatgaaagagccaacctagagaatatgcaccttaaatggcagtttgcagatggtggcagaagaagagaaaaaggagaggaaactgtgggtgtcccaacattctcacctccttttcatagccaggacagttcagttgtgggttggatttcttgaagggaaacagattcggctccaagtggcagggctttctctttcctaagctgtccctggagtcctataatcctcagcctctcatagccaccctggatacgagaccccactggaagccactctgctggaaagttcctagaagcgaggaacctgtttctcttggcagtccctctaacacgagaagccctgagcctgcgtctgtgtgtttgccgggagcgagcagtgggaccataatgtcctggagacaagaactgaggccagtgactacccagcgaccctctgttgcttgtggcctgctccagcctggggctgatgaattcagcagtaaccaaaaccccttttgggtttcaactctcattttccaaaatcagtattaaatgtgggcattttatttctggcctcagtaagcagagaacagtcaatgcagtagaatctgatttcattgatatggactgagtagggtcccaatgagatatatgtagatcagtttggggtgtccttggggctccagttgtgtgtacagggagtgtgggcataggactgagggtgccctggagttcccattttgggaaatgacagacttactgtcacctcttgtcatctgccgacttctcctaaaatgccagaataggttttagttgttgggatttttttttccctaaataacagcagcaacaaaataggatgtcactgcagagtgctgtcctcatgagaaccacatgatcttcaccccgaagtgggaagacacaagaaaaatcctggtgagcgactcagaaaatagtaaatacatggcttgtgtggaaaaccaagtttctgcttatggcccgtcagcagcatgttgattctcagcccctcctggcacaggctgtccctggtagagatgtgggtgagcaaacgtgagaacctgaagcccacagagctagggtgtgagagtgcctctcccctgctacgctcagcccccaaccactgctcgtccacagctgccaagtgtgaccaccacatctgtgggtggctagggtttccaaaccttcatacttaacagagtaatggttattgattgaagggacgtccactttagtaatggggggatatcagatccttaagaggtgctggagatgggctcttctccttctggaaccccaggtaggtaataggaaagggaactgatgagttttgctaaagcagcaaaacctggtttgtagcctgggacacattaaaatggaatgaattcatcaggcagaaaaccatctgctggataagtttagtgaaatgatatcagaccatggtcttctccattccctgcccctccacccctaaccccagctatctgagttggttttgagacagaagcccaggctgaaaggtgcccatcaatcccacagctctccctggggatcctaggggtctgcatctccgtgctccctgcgatccaggcttttgttctcagtatacagagcactcgccttctctcgcttcaggcctccctccttccccctgtggaagggagacctctgccccactcaggggctgtagattccgtttaaagacaggctggatccccctacccccagccccttgattctttggtcttcaacttgctttctagctctcaaagactcgggtaaggggtccatcaacagtgactggaagatagagctccccggagagttccagattgcaggcacaactgttcgctatgtgagaagggggctgtgggagaagatctctgccaagggaccaaccaaactaccgctgcacttgatggtaacttgctgggcttccacacttgtcttagggggtgtggctccgagaggtctactaggttactttccagtttacttctgcctgggacctcgggggcaggaaatgcatctggcttccaggggtttatgccgtcccctgctgctcagtcctctcccctctctgggtcctttcttttccagtcccttgcacaacttgcttcagaattctctcattgcttcccctggctcttccctggccgagctcctatctttttcaaaaggagctgcctcaaagaaggaaatgcttagccacgtggatggcagccagggagacttggcctcattaagcagacagccccactccaagtctgtttttgcatcggttggtgagatgcatagatctgcctgcacagagtgtatatcattacctttcggaaatgaactatgactccaggtccgaactggaatccctcaggtttcacagacccagcttgcaacgagcatttgggaatcagggagggggatcagatgatgtgggtattctactccccaggtgacctccagaaacctgtgagccattgggccaggccagggcgccgtcttacctgttgtctcagggaggcctccatgcaagccactgaaacatcagtgatgcctccttttaaacatgtcagagatctccagggaatggagcgccctgcttccgtctcaagatccaggagttctcatggctaacttctgatggctcatcattatcgattccgggtctccttccaaaaaacaggatttgtggcagcttgtgcccctgtaatcaaaacacgctttgtccacagtgcctgccagagtctctccgtggaagttcttcttccccgttaatttgtgatctctggcagcctgtaagtgttccaggttagttgacacccaaaagattttctagccattgcccagggaatctcctgaggaggctggctctgccggggagcgctggcccccagggtgggcgttgccccgtagtggtgttaaccccgttaaaatttctggggagacaaaggtaaggcagttttcatgtgcaaccaaaccatgtagaaatctgccagcgcacctctcagcccgctaagtccactgcaaatacgttcctgcaagtaggtttctgggacccaagaatgtgtacctaagtcatttatctgggataagattgttccctagtcacagtcagaacaaatcctcctattctgagttaaaagcagttattcagagggactaagagaggaggcaaaacataaaacctgtactgaaacttcacctgttagcatgagaatttgctttctctagcaaacaccaatgtgaatgtatttcccttttcaccaaaagcctttgtaaactgagcaagtggttagcccgttaaagtgaagtccccagcctggattcattcagaccaggatgaacaaaactcggagaaagcaactactaccgtaactgaagtttcagccctcgcttaatattgatggcttttctttcaaaatgtgattgtcacttcaagattttaaaactgaaaatgagaggtgcccctttgcctctatatagaaagccatggtccccaaactggggtgtacacattgtttgcagaatcagtatcaccagtgagctgcattttgcccttgagcttgccttactcctgactctggaccaactgacacagcagtgattgatgatggggagtgaaggaagatgttcatttccaaagaaatagagtcaccccaattgctctgatgcctttctaggtaaaagtttatctgtgtctttcctgtctgcaagggcagctttgtgggtgagcatgcaggaatgtggactgttctctgcgtgacgcagctctccatcaaaagtgcagtgagaggtttcagagtcacttatcctaaagctcctagtctaagctggtctctctcttgggtaggaaagaacagaactccctcacgatggtttgcattcaccccactcctcagttgagtccctgaggaatccagggctgagataaaggagcaccctcagtggaacctgttttcagccccagaaaagagctggttacccctcataaagaaacagccgcagtgtgcctgtgtgtgcagattcggcattcccacgggccttccttccttttcaaaatggccttttgttttgcggctgatccaggtgttgttatttcacgaccaagattatggaattcattatgaatacactgttcctgtaaaccgcactgcggaaaatcaaagcgaaccagaaaaaccgcaggactctttgttcatctggacccacagcggctgggaagggtgcagtgtgcagtgcggcggaggtgagtggccgtggtccatgacctgttgggtgtggggttttgctgaaggaaggagaaaggcatctgtggccagcacgcagagtgtgagacatctgcaacctgtagctccatgggaatttaaccatatcccaccgaaaatctctctgcagaatacttggacagagtcttcccaactcccacactagggtcatgcccatacctctgctttgcctggggcccagggccccacagctctgacctatgggtgaagcggggtttggctgatgtatgattacatctcgggtgtgacaggtggaccctgggaataaacagaatagaccttcaactgctgctgcttgctggaggggcaccagagcatgtctctgcccgctcccaaattcccttccctcttggccacagtcacctcactccaggatacaatggaaagaaaaagtcctgcaagtcgggtgaaacgttctgagcatgagtcctgactgcacaacttcctgcttgacctcagcaaatgacttcctctctctaccccatgtttcttcacttctgaaataggatggttgtctctcatgcacactgcagggtccacagggtgagccaaagagcctgtcgtacagcaagaatcaatatgaccaaaaggcattgtgtttattgttgtgtcattgagagggggcaataggaagccattctgaactctgagccagcagtttcttagtacagtgctgtttgtcaccctagcagggcacatagaagggtcatgggagatggaacacagggtgggtggattttagtggacaaagagttgggacagaaggttgacctggactctggtaggccaacccagagagttggataatggagtggaaccccgggcatagcccccgccatccctagtcctgagcacctattgactgcttggataacttttgttagatgtccaatatgtaaagcattgcttaccatttaagggattcatcccatttttcatgggtaggagttatagacacacaggagtttcttcctgggcatcttggccaaccaccctcactgtctgtgcttagcctattcctgcaacagccctgcggcagttggcatagcctccggataccaccatcagccctgcatcctccactctgcacctctccccggggggccttctccccctcagcccttagctgccgcttgtgccgatggcctttcaacctccaaatccagctgacacatctacctctgattccagccaggttttcctcttgggcagcttgttacaaactaagcatagcccacatggaatagtcaggctctcctggggtcaggggcaggctgttctgttgctgttggcttggtggcaatccttttatgacactgatgacttccagcttcctaacacagtggtcagacctgccaccaaagctgaaagcagttccgtgctttctgtactcatgcgaggctgccatgtggggcagcagcaactggcagtggagttcaggtctccatgatttcgagtcatccctacatgacaaattgcccaggacacagacccagcagggagcccaggatccaaatagttgtgcttgactccctattaatcttttattgtcactcttcccaaataataataatgacagcaatagagctaagatgaagtgttagccacctgccaggttctgttctatggacaccatatatatttgtttattttaatcatcactgaggcaccctgaggcacagggaagttaagcaaaccaggctgcttgaggaaactgagacacagaagtatggtggccaactgttgacactatggccactgtgatgctatttgtgatacagccaagacttgaacccagacagcctggctccaagggccaccctcctaactcccagtcactcagcctgcctgacaaaggcatggccgtgcagtatttagggtgacaaaggcatggccgtgcagtgtttagggtgctctgggaacacctataagaagggctacatctatttgggataatgaattagcaaagcttcccaagagcaggtgggggctcagccataagtaccagctggctggctagacaagtcagaatggctctggaatgcctgtctagaggatgcaggtctgtgtgtcttccagaccagactcctcatctcccacttctccccagcaagcaggaattctgtaataggtagccagactctgctgagggctgatgtgcaggtctttaattgagatcagatctccatagactttaaacatcaaacaagcagataaaaagatgagcaatctttggaaatcaaaggcccaaatcaacgaaccccaagctgtccaaggacaccgctgatctgaggtgttgctgctttcttatcttgttctagaatcttccagggccccactctgccttctgtgtcttgtactctcctccctacgattatagttcttcctctctaaaaacccacatgacatttacagcagtcactttaaatgaccaagtgaccatcagcagcacccaaacatgctttcatgggcatgcaagcccagcctttccacgtgggtgcagccacagtctctcagctccctgtggtttggtttccaggggagcgcagaaccatcgtctcgtgtacacggattgtcaacaagaccacaactctggtgaacgacagtgactgccctcaagcaagccgcccagagccccaggtccgaaggtgcaacttgcacccctgccagtcacggtaagaagctgggttctgtagcttggacccaccagagtctggggcggcagcaccatcagtggtggggagtgatatgcagttaatgccacagtactgctctatgctgtgttccgttattgttgatgagagatttccgcttgctcaaattaccaaatttccagctactaagccaggactctgatggaaatacaaccttcactggaaggcattgtgtaggagaccattagtaacatctcatggcaaaaaaaaaaaaaaaaaaaaaaaaaatggccatcaccacacacttttaaccattggcttccccaaattactttgtcttggtggagaaggaaacaaatattggagtctgagtgcccaggagaaaggtgcacacaggctaatgttgtgggtgacctgtttcagtggctgaaattcatgccagtgagtgtggatcttggtgtttattcttcgggatccatcagaacttctgtcccagccccagctttcatggccgtgttacccttgtggactctcttgggttgtcaggagatgaattgtgtgaaatgcgttcatcagctaagcctcctctttttgagtcattttagcgggactttaataatgaatccattacgttgtggcatgtcaccctttggccttccgtcctgctgtgaattgaggtgaatggtttttgctttgtggttctgtgtatcatttgaggcatattgaccttttctaactaggctaggtgtttagtatttccattttctaggtttcttaactcaatttgtgccgcttgcctagtacaagagcttcacaacatatttggcttttgcaccgaccccctttgttttgtcaaactcttaaaatgtgtttgagtgagaaagagaggagacaggaaggaaaaaaagaaggtgaggcttgctgtgatgattttctgtgctccttgccaaattaagaatgaaattccaccctaatgctgaaggcctggaggaagagctcactgcaggaaatctgcttgagcacctcggtatgagcagctgtaccacgaacctatcgatcagtccatcaggtcatattcaggggccacagaatggaggatttgccactgtaaagactcagcagtctaacaggctacagcctcttctctggaaactaaagatggcctggccctggtgaagtgattagaaaatagggtaagagacgatggaggaggagaggtcagcatgagctcaagggcatgattgagcaaaaaggtcttagggctccattcgagaagcatgtttttattggggaacctgcccccaatagtcacataggttcttttctattttccctaagcgtcggctggcttgagaaataaagggacagagtacaaaagagagaaattttaaagctgggcatccgggggagacatcacatgtcagcaggttccgtgatgcccccaagccgtaaaaccagcaagtttttattagggattttcaaaaggggagggagtgtgtgaatagggtgtgggtcacagagatcacgtacttcacaaggtaataagatatcacaaggcaaatggaggcagggcgagatcacaggaccacaggaccggggcgaaaaattgctaatgaagtttcgggcaccattgtcattgataacgtcttatcaggagatagggtttgagagcaaccagtctgaccaaaatttattaggcgggaatttcctcatcctaataagcctgggagcgctatgggagactggggctcatttcatgcctactgtctcaaccatagaagacggccacacccaggggggccattttagaggcctaccctcaggggctcattctctttctcagggatgttccttgctgagaaaaagaattcagtgatatttcctcccgtttgctttagaaagaaaagaaatatggctctgttctgcctggctcaccggcagtcagagtttaaggttatctctcttgttccctgaatgttgctgttatcctgttcttttttcaaggtgcccagatttcatattgttcaaacacacatgctctacaaacaatttgtgcagttaacgcaatcatcacagggtcctgaggcgatatacagcctcctcagcttacaaattgacaggattaagagattaaagtaaagacaggcataggaaatcacaagggtattgattggggaagtgataagtgtccatgaaatcttcacaatttatgtttagagattacagtaaagacaggcataagaaattataaaagtatttatttggggaactaataaatgtccatgaaatcttcacaatccacgttcttctgccatggcttcagccggtccctccgttcggggttcctgacttcccacaacatgttttaaaattagttctgttttcaagctattttatacccaagtctttttaaaattatgcacagaaaccagtaaaatgaaacagatgaaatgagaactgctaccactgaattgagacacacacacgatgtggcagagtgggccagtctactccgccttttccacctctcacagtacgccctggcttctctgtggaactccagggataagattttaaaataaaggattctgcttcctgtaacgatagagtagcttatattggaccagccctcctacagataacaattaagaactctggagacagtataaaaagcaattgtttaaaagctagaaagcagcctaggtgagggggcacacacctgtaatcccagcactttgggaggcaaaggcgggcagatcacttaaggtcaggagtacgagatcagcctggccaacatagtgaaaccctgtctgtactaaaaatacaaaaattagctgggtgtggtggcagatgcctgtagtctcagctactcaggaggctgaggcaggagaattgcttgaacctgggaggtggaggttgcagtgagctgagatcacaccactgcactccagccttggtgacagagtgagactccatctcaaaaattaattaattaattaaatctagaaagcagttagaaactgaagagaaatagagaaatggaggaatagaatggcatggaattgaattacccatgttgacagctcttcaaccaaaggaaggccctagttgcattgagactagctaaaactctgatagttacccgccatcttttactggttaagccatcagaggagaatattcagggaaacccatagcagctggaaactgagaaggaaaaactccagaaaggagggagccacagagagtgactcccaaattctgcatatatctcaagaatctctgggaattcttagagactagggccaaatctaagaataagacaggccggccagactccacatagcacagctaaagctagaagacctgaactgagactgtagctgctgcccaccacaagagagacagtgcctggagttttattccagccaaattagctgcctactaaaacaaaaattcaatattcttctaaaatgaaactctagagctgcatagttcaatatggtggtcactagccactccaaattgaaatctgctataaatataaaatatacatgaggtttcaaagatttagtatgaaaagagattataagtctcaattattttataaaatatttaagattataaaatatcttaatttttaacgtgattactttgattataatcgtcccaaatgattatatttgggatgcattaggacaaacaaaatatattactaaaattaaatttgaggttattttaatgtggcttctaaaaaaatccaaattaacaggctgggcatggtggctcatacctgtaatcccaccactttgggaggccaaggcaggcagatcactgaggtcaagatttcaagaccagcctggccaacatgatgaaaccccatctctactaaaaatacaaaaattagccaggcatggtggcgtgcacctgtagtcccaactactcaggaggctgaggcagaagaattgcttgaacctgggatacagaggttgcagtgagctgagatcacgccactgtactccagcctgggtgattaagccagactccgtctcaaaaaaaaaaaaaaaaaatccaaattatatatccagttctcatcttctttctgttgagcagtgctgctgttgattagtgtatcattcacagtgttccaggtacaatccaaaattactagtcatatagggaaacagatccatactcaaaagagaaggccattaatggagactgactggaagatgacatgtatgttggaattagaagaaaagaatgttaaagcagctattgtaactatgctcagaaacgtaagaaaagctatgctcatggtcatggaacatataggagatcttagaagcaacaaagatatactctacaaaaacacagttttaggactaaaaaataaatacaatatctgaaattttaaaaattcactccatgggtctaacaacagagtaagatgatgaaagattactgaacttgaagatagaggattagacattattcagtctagaaaatgggaaggaaaaaattgttgacaatgagcaagactcagttacctgtgggatagtatcaagcattctagcataagggtaattggagtcacagaaggagaggagagagaaaatggagcagaaaataatcatttaagaaacagtgatcaaaaatttcccaggtttgtgaaagacagatgagaggtaatcagatcacatcttcatgtttcaactagattccagattaattcaaagtgccataacagagccctctgatcattgcaacaagtgggcaagtatatcaagttcgtgattttgcctcccatgtatcttctaagagagaaccatgctgcactgcaaaactgaaaccagaagatcatgtaggaaaacacctacaaaacaaagtgacataaacaaacatgagtgcagactctattaatgagtgccacagagctgtgctaagcctacgatagataacatcaagtgtgtgtattgctacagaaagttcagagtcattctggcttgatggaccacagtcctgccgtgttgccacgtttgagccaagttcaagccaaatacacttcagactaaaagcaatttcagaagcaagttcttagtatctccgtagaacaggggtcagcaaacttcatctgtataggtctagagaataaatatttttgccttcgcaggccacatgtggtctctggcatatttttttctgtattttgagtcataatcctttaaaacatgtaaaatttgttattcgcccttgggttgtccaaaaataaccccgcaggccagacatagcccacacgtaagagtttgctggcctgtgttttggattattgcttactcccgttttgcccactgagatattggcaccacgctctcagcatgagccagagctctgcaggtattagctcagggaatgtattttcttattatacaaaggaggacgtgttagaattctgaatttctttttattgtgtaacttgataaatattcgatttctgcctccccaccacttctctttcccacttccttacactcccttcctgactgtaaaatcatgtgaatcagacttaaagaatgagtggaattacttagagcagagaagaaaatgaaattgaaaaacaggagaaaatagcacctaagatctgccttagagactgtagacagcaagtgcctggctccctgccccaggctggttttgtttgctcatttgttgatttgtttattctgaaccatctgaccttgtactttttcttaaactggatatgcgagtgccatgactcatcaaagaggatttattgtttggctaaagaaatgtatgatctgataatagattttgaagctcttgcaattcctaacaagatagatccgtgcgtacatacatacacatacatatatacatacacacatgtaaatgtatctacatgcaccatatacatatatatatgtattatgtacagtagttcccacttatttgcagtttcactttctgtggtttcagttacccgtggtcaaccattgcccaaaaatattaaaaggaaaatttctgaaacagttcatcagttttaagttgcttgctgttctgagtagtgtcatgaaatctcacaccatcccgctctgtcctgcccaggacgtgaatcatccccttgtccaggggatccacagtgtctctgctccctgctggttgtcactcagtagccatctcagttagatcaactgtagggtgtcgtagttcttgcgttttacttaatattggtctcaaagcacaagagtggtgatgatggcaactcagatgtactaaaaagaagctataaaatgcatcctgtaagtgaaaaggtaaacgtcttcaacttaataaggaaagaaaaacaaatgtatgctgaggttgctcagatctacagtaaatgaatcttctacccatgaaattgtgaagaaaaagaagaaagaaatctgtgcatagtatatacagggttcagtactagccttattttcaagcatccactgggggtcttagaacatatctgccacagataagggaggacttctgtacagctattatacacacacaaatatttggacaacaaaatttgaattattgcatggcacgatctagttgtcatgagtctttcataagaacctatggttacatggattcatgctagtaagtgaagaaaagtagaaaacctgaccttaggaaatgagtgccagaaaatcggggagattggacacacaagtaaaaactgcacctgggcaacagggtaaggtggagatgtggagggtctggattacaaatggctgtttcagatggggtggcatgagtggaggacagagcctggaacctggaagaagcgcccaagaatcccatggtgtgaactttattaaagaagccagaatgcaacccactgttgaacctggcaaggtgaaagagcctttctatgttattgttactctttgacctttaaagtggcagagatgtttgtctttttcctttatactttcctttatttctcctgatctccctttaattttcttcaaccctttttccattgagttcctgacagtttcctttgccttcccaactgcacaccattagcaccactttattctaatcctagctctgtggatacttctcccaaaccctgctgtaaccatatggaatctggagtccgacacgcatggcagatggcgtctccccagcatctcacacaccaacacaaaaacattgacaaacctgaccctgacattggcaggcatggcagaaatcacagatcagcccagctgttatggccatggccagcagccttcaccttgctaaccacagtctgcagggaagaggcctccccatcattcagcatccaaagagcagtactgtgtgacgagacccttgagacccagcctcaggtggtcctggagcaaggaggcaggggctgccaatgaagtggacacgtcccggagcacagaccttgtgctttaccagatttaacatttttgcagtctttaagagcttattagccacttgaaaaaggccattccaagttattagatatttccctatggtatttatgatttgaacttcttcccaggcagtacatgctgtactgtacattgaattagagtgattcagaaaagaacattcaacatcttactggcaattgaattgaatagtcatttgcaaggaagcgtatttggtttttaaatgtgttctccttcctcaattatcttaatcaggctggccttatttggggttaaaatggaatggaatccctttttattaaagcatattttgtgtgtgtgcacgcgtgcatgtatgagagacagagagagagaccatgacttaagaatgaagcctggaatacgtggatctttagctattgccacaatctgaaaagatatggttttttaatcaatttcttgctagtctgaaacataaacattttctttcctgtctttttctaaaataaaataggtaaatctaattgtgactaatacctgtggtgtattacatgccttgttgatggtatgtgagtggggaggagaaatttagattgccaagatgctggaactttttctgacacaaatttcaggatgtcacctgtctttaaattaaatgttaagttttaaagccttaccttatttatctaaattaagaaacattcaagatggaggacaagaaagcattttcagaggtttttttttttttttggtcatttgaccatcccttcgtttgatcattacagaggatgagagaatgccctggtaccaggttcacaggtgacaggatttctcctgttgggaaatgctttgcatgtaggctctgcaacccatcaaaagagatccttctctcttcctgatttttctgagtaataaaatatgaaaaccatcaagcacttgatgtttccatttgactttttatgtcacagttacaagaaaggacaagtaaagggaaaaggtgagatttagtctgaggaatactgaaagaacaacaacagccgctgccccaaaaaagattacaaagcgatctctcagaaatgaagggaagctgtgtattctccaggttctggaagaaacatcagcccacagaagaaatggctgtgcagtaagggcaacagtggaagggttcctagcttgtggaattgctgagggtttcagaaatgagcttggatatgttggtggctgcgtctcaaaacggccctttccccttggggtctaatgaaggtcattcttggcggactcctctgctggctgactcttacagcaatgaacagtccacagataagaatgattcttttctccttctgagtgtatacttatatacaaatacattgaaagtaaaaagatggaaaaagttatatcatgcagacagaaagcaggagtgctatactaataccagacaaaaagatttttttaaaaaaactactagaatacagacattttatgatgataaaagggcaatccatcaggaagatacaacaattataaacatatgagaccctaaaatacatggagcaaaactgacagaaatgaaggaataaatacctaacagtaataactggagacttcaatacctcactttcagtagtggattttaaaaacaaggtgtatcaacaaggaaatagaagacttaacagtataaaccaaccaaacccaatagatatctataaaacactccacctaacaacagcagaatttgcacatggaacactattcagaatagatcatacactaggccagtaaataaatctaacaagcacaaaacaatagaaataatactaggtatgttttctggccaccgtggaatgacattagaaatcagtaagagaaagaagtttaagaaactcataagtacatggaaattaaacagtacccttcctaaacaaccagtgggtcaaatagaaatcacaagggaaactaaatcatattttgagatgaatcgaggtgaaggcacaatataacagaacttagggaatgtggctaaagcaggccttaaggggaaatttatggctgtaaacacttatactgaaaaagaagaaagatttcaaatcagtaaactaaccttccatgtaatgatactggaaagaggagcaacagaacctaaagcaagcagaatgaaagaaatagtaacattcatgcagaaataaatgaaataaagggtagaaaatagtacagcagaataataaaccaaaagttaactataggaagaaatcaacaacatggacaagtctttagctagattggccaagaataaaagaagacgtaaattactaaattaaagaacgaaagcaggaatgtgactactgaccttacagaaataaaaaggattgggaatgaacactatgaacagccgtatgccctaagttagataacttacagaaagtggacaaagtcctacacataagcaggctactgaaaccgaataaagagcatctgccaagaacccacagccaacaccatacttaaagtgaaagacggaatgcttttctccaaagatcaggagcaagacacagtatctgctcttactatttctatccaacattttattaaagattccagcctaggcatttacccaagtaaatgaaataaaatgcatccatgtttgaatagaagaagtaaaactgtctgtatttacaaatgacatgatcttgtatacagataatactaaggaatctctaaaaactattagaactaataaacaaggtctggatgtttacagatgtaagatcaataaggaaaaatcaattgtatttctgtatagtatcaattaagtgaaattaagaaaaaaatccacctataataacatcaaaaagaataaaatactttggaataaatttaataaaagaattttaaaacatattctgaaaactacaaaaatatctcaaatagacattcattttcatgaatgagaagacttgttaagataacaatactctacaaattgatctatagatttagtgcaatctctatcaaaatttaagccatctttcttccacaaatggggacatgtcgctaaaattcatatggaattgcaaagggcctcaaatcatcaaaacaatcttagaaaagaataacaaagttggagtcctcatgcttcccaatttcaaagcttactgtaaactatagtgatccagacagtgtggccctggcataaggatagacataaagaacaatggcgtataactgacagtccagaaataaatcttcacagttactgtcaactgcttttccaccagggtgccaacagcaatcagtggagaaagaatagtcttttcaaacaaatggtgctgtgacaactagctatccacatgcaagagaatgcagttggaggtggggcgcattggctcacacctgtactcccagcactttagaggattgcttgagtccaggagttcaagaccagcctgggcaacatggtgaaaccctttctctacaaaaaaaaaatacaaaattagcctggtatggtagtgtgtgtctgtagtcccagctacttgggtggtggggggcaggctgaaatgggaggtcgaggctgcagtgaatctagattgagattgcaccactgcactccagcctgggtgacagagtgagaccttgtctcaaaaaaagataaaggacaatcaaagaatgggaaaaatattttcaaattatatatctgataaggaacttatatgaagaacatctaggccaagcatggtggcttatgcctgtaatcccagcactttgggaggccgaggcagacggatctcctgagctcaggagttcaagaccaacctgggcaacatggtgaaaccccatctctactaaaatacaaaaaattacttgggtgtggtggtgcatgtctgtagtctcagctactcaggggacaggcatgagaatggcttgagccccagaggcgaaggttgcagtgagccgaaattgcgccactgcactccagcttgggctacagagtgagactctgtctcaaaaagaagaaaaaaaaaaaaaaaggaatacctaaagagctactacagctcaataataagatgacacagaacctaattgaaaactgaacaaaagatctgaacagacattcctctaaagaaggtatattcagcatccttagcagggaaatgccaatcaaaccatatgatcacactcactagtgtggctgtgatcgaaaagacagatgataacaaatgttgatgaggatgtcgagaagtcaggactttcatactctgggatgggaatactaaatgacacaaccgctttttaaaaaaaatctggtagttcctcaaaaagttctgcttgagttattattcaaatcagcaattccagtactatgtatatacccaagaatgatgaaaacatgtccacacaagagcttgtacacaaatgttcatagtattataatggctaacaggtagaaacatggcacatgttcattcactgaagaatagacaaaatgcagtagattcaggcagcgcaatattattcagccataaaaaggaatgaagttctggcacagagaaaccctgaaaacatgctaggtggaaaaagccagacacaaaaggtcacatgtgaaattccatcgagatgcaatgtctagatgagacaaaatcggtagagatggaaggtagatgggtgggtgcctagtgctaatgaggagggagagggatggaagtgagggttgataactaaagggttacaggatttcttttgttgtaataaaaagatcctagattgtagtgaaaaccattgaattgtgcgcttcagatggttgcattgtggtatatgagttatgtctcaaagctattaaaaaatgaactcacaaaaaagtgcgcacttacggttgcaggctctcgagctaaggagaggcctcccgcaggctcccgtgagtgcagaggctgacacaccagcccagagctcacgatatctcgggacttggggcagtggggacagtcaggagcctgtgctagaaaggtcctaattgtcacttctcaagcaggaatcagtggaccttgtttagtggctgcctttatcatgctgggctgcttctctcaccccttcctctgtcctttcccattacgcagtgccggcttctcccagcgcctctgtcctaagacagagaatttgcccagtgtggtccgttgcccttcggcaggccctttcacagtgcaccttccccttgctgcctctctgcaccctccttgcctttcccctggaggggctttcctgcaagtcatgcacccaccatggctgccattcccaaagactctgacaaagaagccctactgcttctccctgggccagccatcatctttgcagcctcatagaaaagccatcccgagcatcacattggagacaccctcccataggctggttgggtttggaactgagagtcaaggattttctttccccatgttctctgtgcttctcacttgcaagggagcctggacgggaccccctatgtctctgagcagtagcttgtacactcataacatgcagagaataacagtattctctgcatgttatttcagcaataacttggtgagtcgtctcttcattttctaggttatttctttttcatatttatactacttactcccaggttcttgcaggatttgacattgcttaatatcggcctgagcccacctaccttagtactggacaagatgaaaaagggtgttgtaaactgtacagggaggccagtctctgggggtccctctggaaccacgcagacccgcctgtcctcctggtggccccaagctagccccgagactcggcacacctgaggatcaatgcttagatttgctcaccccagtcagtgaaatcctaccctgaaaaaagtgccatcctccttttctcctcatcccctgcacctctgcctcaaaccccaaaacagaaacataaggataagaatgagcaaacattacacactggtgagacagtgaaaataagaacgtaaccaaagtcgtggccaggatcccttcacacacagacagggtaagtctttcctcgataatatatgtactctggaaatactccagaattaaaattaatgttttaaaaataactgagcacatcccttatgatcacgttttacatctgttcctttctaagaaaccatttgagaccttctagaaagacctcacataggctggattcataaacattcaggactgcctgtcagagctaatatggtgaaacctgggtcatttctaaccatctagagcattgctggggaactgcatgcctggcctctgttcaaaggtattgctcttttgaaagctgagcaccctgagtacctgagggttgcctttttacaaatgttccaagtgcttgagttttccccatggagtatgacattaatcttaggtccccggggtgatggggcatttgctgggagacaggcaggttctccttttccaaggaaggtggccttccagctctgtgtgcctgcatgtttatgctaaggggattattaaggaaagaatagaatgaaacatttatcagtaagctaagggcattgcactgggaaggaagaggctgaacctgttttaactttttcttatgtgggaatgagtttatcaggtccttttccaagagaggttttaatgctggaggaataaggagaacaagtaggtgtcgggcacacgagggagcaggatggagatatctgaagccaccagtggccctttctccagttctgtttgggacattttccgagagggacttagtggcttaaatgtcaaaggaaagagtttgcaagtggactgtctgggactgcttgtcggccaaggtcacaaacaccagttctgatagaaacaatggtgtacacgcggggtccttcttcccaagcccagcagtggcatcccctttctgcaggggctcactgtgctcttcaggtgaggccaggcatccagcctggtagtggcaggtgcttcccaggctgcagactgcatgctctgcagcctccttgttggccggccaggcctctgcactgtgtacacagtgaccacggtcacagcactgcctcccacagcacggcctgtgccaagattagagggaaaggggattccgtgggcatgtcaggtagggaagtgctggctcagacagccccacaggtctgaatcctccatggtctcttgccagcagacgcactgttggtgtgccactgtgtgctgtgaaccactttgagaatcccagccttgtgcttcttcccaggagaattgtaatcctggagtctacctttcctggagcttctgcagaaagaggtgctctcagcagcaaggtcaaggcactgtgggctcacaagggcttggaggaccctataccttcactagaaaagtaaacacagccaacctctttcttccattggatagagctagtgtatagtggaaggtaaggagaccatccaataagctgatggcatcactgccaatcaaactgctgtccccaccagtctcccaatctgctctgaagccatggctgtggtgtggaaatggaaggaggtgatcgtggcaccactggcttctagagcacaattgggccttgctgggccacagaaaccagatctgaacttgccccaaaaagataagagaatatagaaagaatgtggagtagctcccaaaattgaagagacaccgaaaagttggtctgggagagaagatccccgaattggctggagcagctcctgtatccactccaaaggtcactctgctcagaacccaggttcctgcaaagtcttatcagtctttctcagctcatgtgctctcctgttggccaacaaacgggagcatggtaaagaaaaccgaggtgttctcacctctcaccagaagaaggaagatgacgtgagacaggcagaaactattaagtcctatagacaggctaaggtcatgatctaaccaagactgagaaatgaagactgtccaacccattctgctctcagctagaatgagagcaggcaagtctgttagcaagagggctactgtactggaaaatccctgtgtactgggaaaagccagcccaactggaatgttactcttggatgggaactttcaacatcagcagctgtgtgattctcaaagcatgagagttttttttccaaacccttcatgactgggtgtggtacaacctgttaccaaatccagacttatcctggttattttaacctcaagattgtaccaacagaatcttcagtccccagagtgtaatttgatcaggtgtgatggcttgggaaaaaaataaaaatgggtgcagtggactcatcagctgctggttcaaccctgttcactgggccttctgcttcccgttgagagcttagtttggacccataaattccagagaaccattttttttctctcaaaacaatacttgaaaatgattattgtaaaagtagagaattttaaaactcagaaattgtattcttgctaagacgtaaagtacagaagcagcagaaaggcaaagctctttgggaatgggccagttcactgttgctcatcagcagtaaggagagaaaggaggaagtggctgctggctgtctcgtgggttaggtagccccacagtccctctggaaagtcgacgtattcacctcattttacagatgaagacttcgagacgcttagtcattaagtagctttcccagctcattctggtaacagaatgcaaaacaatgttttcctcctttaaatcttacatactttctgctttctcgttctcattttaaaaacagtacagcctgcttctgccatggcattaaaaagaacccttttgaccaaggcagctctaaattgatatccaaaagcggggcaagagagtcatcagacagtactgtagtggcatttaactccgagtgctatcaaggggaagctggagtggttcctttccctggaagtgaaactcgcagcccaaaggcccaaagctctgggattaaacactagagcaatttttcagaatgctgtagttagttggttttctggcttgttgttagtgttatctgcacccatactagaaaagaaatgaaaattcaggacatatctaacataaggggttcaatatgaaggtggtttcccaggagacctggggagatttggggttgaggcagtgagaggtgctgacgggtgccttcctggacctctgagacaagcacactttctacccatgcctagctgaccttgagcttggaggggctgggagggactctcagtcagaccccaagtaaccagtgatgcaagttggcaggcaatggaggagaggtgcgtctgtgtcccaggcctgagattttctggataaggaactaaacctttgatacccgttcaggaatcaaacccacagcttctgaaacctccatgctgtcctctatgggtaagtaatgcatctacctgtaccaagtgccgcgtatagacaggacacctccgtcattcctgtatggtctgtgtgactctgtttctttagtcttccctttctttttcttgttcctcttccccgtaagggcaaggaccttatcagtgctcaattcactcagcaaatatttgtcaggaacttatttgtagaaccaagctgccacacggtgagtactctacaaatatggaaatcactgggtgtgcagcttagtctccagtgcccagcagcgcctagagcttagtaggtcttagtaagtcatttgaacagataaatggattgtttgatactggtggagggaatgtgcctcagtcatcccagaattgctcatctctatggttagcggcattatgtcgaaaatgagatttcattccggtggcatgagcatttacccattaggggacagatgtctggtctggacagatgctccgttgatgaaggggtggaaatcagaggctggtttaggaccctggtgtatgttggattgtcttctagttaaatcattcaccctctctaggtagagcctgtggtcgactttacccatgctgtgtcctacccatagcccaccttgacttcttcctctagtcctactcattccactctcagcagcagtttctgcagacatattttaaatctttcctttacctgctcatgctttacagcagcctttattgaaatggatttgtttaaagttggaagcaatagcaagatcatcatctacttatcatgtagaggcaggaagacatgcaatttgttaggttcggtagctagccagaaaaagaatgaaatgctccatccatttcacccaggggcagcttcacatggtgggcattgagagactgacctcaggtccccacctcacccctagctgcatgcaaacccacgggcaagttacatgatcttgccatctgtaaacatgggaaatgagaacatctgtcatagaagtcttgaggagatgaagtgaagtaatgcctataaattccttcaccccgagtcagcactccgtgaacgccagccaaaactatcatcactgctcaactacaaaactatatcgatgatgaacatcagccagctgttggaccccaacattttgtgggttatccattatttcgtaagacactcctcacacatacacatgtgagcgtgcacacacacatttttaatacagttataactacataatctaaacccatgctggtattttccagatagtaaaagattgcgggcaggtcccagagtatactaacattccccttcttgtcagaacaagatcatataatttatacgtatttcagagtaaattgcaacagcagaaaagtcttgagtggttcatttctaacctcttgaatgcttctgagctctctacttgtgaactttagatagtatcatcagcaggatgggggtaagactagggaaggaaaaaggatcatgggagggtctcagcatcattcaaacccgaagattggatttcaggctcagcgcgtgactagagatttcacagatgtgccatgcccaggtggctcattacagaccactggagccctggtagggggagcgtgaggaggttgcatttgtgggtggatgtgaaaggctggttcctgccagcacttctgtctgctaacctgtatttgggtttaaataccactgaaggaaggagcctgatgaaattgaagtacataatttccaaaaggaattccttacgacattaagggcagaaattagcactgaggaggtaatgaacgtgccctggcccacaccgtgcacatggctcagtcgtgttttccttccacgactcttaatccgcttcctgggaagaggatgttccctggccagggggagagagctttaccctgaatcatgagaacagggagggaaaaacatttcagctgcacctgcccagtgagttgtcagggaggacaaagggtgatctgggggccagcacctctcagagagctgatccgaagcaaggctcaggcctcgggtgattattttcccaatatgtctagtggctctactgtgctgaaatccccaggagactgggtaactgacagagtgctgggccccactcccagagcttctgattcagtacatccagagtgagacctggaaacttacatttctagctagggctctgatagcactcatgatgctggtccagggactgcattgagaaccaccagcatatagtaacgaaggtcccttgacattttaactcagaaagcatggtggaaatcaccagatttggtgaattgggtcccatgacttgaatctaacagcagatgcaaaaatccttcagtagagatagagtatggggcttatctaggagggaaaggtagtcggttacctcatctcctgaagacttcagggcccagagcccaggccactgaggggagagagccacaaagcagagacctaaccaagtggagactgaaggcaggactttgcaggaggctccaggcgttgcatggcagcagctctggtgactggagctggggatggaaatgaggcagccggatgccctaattgacagacaaagcactccccatttctcctctctctggcataaatggatgaatgaaaggactcatcaccctgactttatttcttacaaagcaggaaggtttgtgacaacctgggaagcaacggccattttgttttgcagtttgccacagtcaggaaaggaaaccgagcagggttaaatttagatccctatgttttgagaagatattaatagaataagtaaaggtcagagtagaggtagttttgttcccacagctacagaaagtcaatacagctcagcaccaagcggaaatctgggaagattccattctgactccataatcacaactgacccaacaagacataagatgggagacatactcaggactaggggttcaccctggtggctcagggtgaaccagatggaaagacccaagtgcactgaggcatgcagcaatgggagggaggaaacagtttggagccttagcaggcagctcgggccagacagcgagatgtccgcaaacagccttgctaagaaaggtttgacaaagataactttttgtggttgttttaagttagcccttgaaataaggaaaactgagaaggagatgcctgttaaggctaaaagtgacaaaaggcaaagtgcaggttcactgctgcttttcaaaaaggagaaggagggtaaaggtagaaggcaaaggtagaagaaagcaggcaaagagcatggcagctcaagaaaactaaggagggaaccctgagaagcagaagcagtagagtgaggactccagcagccaggttcccatctcagccccgctgctgccagcaggggacctgcagcaggccactcaacctgtctgtacgacaggggactgagagagttcctacctcagagggctgtcatgagaatgatgcgagctaagagaaataaatggctcaggacagttcctggcacacagtaagagctaaatttgtcatttttatgatcactgttatgattttctagaagtgtccaaaaccccattccaggacaaaatccaatccaagatgctacagaactttacagctgtcatctctgaggctctgctgactggttctgagaaatcacagcagacaagagcagagccagtggtctgagggctgggtctcaatttcccaaacagataaatggccgggtccgaagaatgccgtttcagagtgctgtcaacccctggcacaactagaggatgagggatgatttaggcagatggtttgcatgcatttttgaaaagaaggctgcatgagtgccccaaatgtgcgagggtttaatgagaacattctgcgcctgtctgacagtgttattggggtggtgggtcaggtcagcagagcacttagtaagcttcccatgatattattatggatgaagcagggacacagatggcagctgatggctcatcacccaggcactacagttcctagagggtctgtctgtggctctgcctgtacagcttgtcagcagcctcctgtcatgtgacttctctgggtagggctccccagtggggactgccatggggtcaggagactccacagaaatgtgtggctatcaagtggtaggactcgtctcagaacggggcactcattctactccccagcccactccttctgactcatgagactcagactcccagttctcagggtctgcatgatgtcctcacagatcagaccaagattttataactagctaaactatccttcgagtatcaaagctttagaaaaacaattttaagtagacaagagctgaggacgctgtatccatgagcccttcttgaggaatttaccggagcaggaatcagcaaacttttccagtgaaagacagatattaaatattttaggctttacaagctgtatagtctctgtcttaactactcaattctattgtagcacaaaagcagctacaaacaatgtatagacaaatagacagggctgtattctaataaaactgtattcaccaagacaagtatcagggaggatttggccctcaggccatagtttgtcaatcccactactatcataggatgcccttcatctaaccaagagatgactagggtcagcggtaaaagggctgatggtgagcatcttaggatgtttaattgtggagctaagactaacacaaagttagatacaggaatgaaaaataatatgtaaatgttatatgctctgacaaaatgaaaagaatgcaactaaaagcaatagaaaaaagagtagaataaaagaataaaaagaaagaaaaaacagaaagcaggaaaatcaaataataacatttgtcgttgtttagagagtgggtggaagtcaagagatatcattaaaaactgataaaccaggtagtaaaagattaggaaagagagacaaagtgcgttttacaaaggtatgagtacttctgcacctcccgactgttgttcaccctgttctccctgcccataatgccttcacctgtattctccacttgtacacattaaaacacaatgtgataccactgacacacccactagactgattgaaatagaaaagacagatgatagtatgttttggcaaggacgtggagccattggcaatctctgtcattgctggtgtgagtgtaaattggcataaccactttggaaatctatttgtctaaacatacaaattctcatgacccagaaattctactcctagattgtttcaaggtgggcagagctatgcagacattccccaaagtctgaggaagctgagaggccaaagaggctgacaaatccaatttcttagaaagaaacatttaatagggacttaaaaacagaagccatgcctgtgcctcgggcagcagcaagacaagatggtggatccccatgccattgtcccccagacccaggtcaaggaatggttcagatgcaatttgtaggacaactgaagtgtgatagcataaggttgtttgacctaagagcacaatttatggtatgtgcctgcttttacacaagcaacagtagataaattggaaatctcggaggccttcctggaactacagttagtcagttaagccaacatggcggataagcattcaagatggagttgctttagcctcccatttaagatgcagttgctttagcttccacataggtgtatgccagcaagttgtacaagacatgtacaagaatgttcagcacagtgctagtcataagaggccaaaacctgaaacaacccaaatgcacatccacagtacaatggatggattgtggtctagtcatacaatgaaatacgacacaatgatgaaaataaactattgttctacaaaacttggatcagtctcacaaataaagaagctagacacaaaagacaagagtgcctgctctgtgagttcatttatataaagttgaaggacacgccaaacaaacctgtgatggtaggagtcagaattgttgggggaggctcataactgagtatgaggaggccttctgaggttctggtaatgttccttttcttgatctgagttgtagttacaagccttgctttgtgaaaatttcatcaagctgtatacttataatttatatacttttatgtatttatgtgatacttgaataaaactatcaaaaatggttggagtaaaacaaaaacaaaaacctatagataccaaaaaataaataaacagtaaagaaataacatctaaaaaacacagaaaacacaataaaatatacacagtaattataattaaatactactacaaagttgagatcaagtgtattggaattggcctagcttactggttaaaagaaaaaaattttctttttctgaaagaaaaggcgtggtggctcacgcctgtaatcccagcactttgggaggccgaggctggcagatcacctgaggtcaggagttcgagaccagcctggccaatgtggtgaaaccctgtctctactaaaaatacaaaaaaattagctgggcgtggtggcgagtgcctataatcccagctactggggaggctgaggcaggagaattgcttgaaccctgggggtggaggttgcagtgagccgagatcacgccacttcactccagcctgggcaaaagagtgaaagtctgtctcaaaaaaaaaaaaaaagaaaagaaaagaagagaaaaagattgtcaaattggctcacaaagacccaactatatgctgtatgcaaaaaaacacacctaaaagaaaccgattcaaaaaggctaaaaataaaggtattccagggaagcaaaaacagtaagagagcagaggtagcaatcctaactttagacaaaatagacttcaagccaaaaagcattaaatgtggcaaggaaacttacattaaaagtcttaatttataatgaaaatataacagttatgaatatttatgcttcaaataacacagcagccatttatataaagtataaactacaggagatacagagagaaatgtattggctataggagacaacattagcgtaccactctcaacccaagaccgatctccctgactgtgtgatcctgagcaggttacttcacaggagctccccgcttatctaattgggaatcaagtgaagactaaagcacacaacatctggcatatagaagggtccagttagtgtggttcttattgtttatttacttgaagcaggtcacattgcaactagacatgtatttgtcaaggtcacgtgctaaggaaacattgaccggcagggaacatccaaagcaggggagtggggtggagggactgtagcctggacactgctgcctcttaaggaacagctgaagggctacatgcataggcagaaagaagacacaagggatacataggaggacttttggaaaccttgccccttcacaatgtaaagccttcacaaatgtaaagcatcgtcactagagaacaagcatacccaacaggctagtgggtcaggcatggccgggtcatagtgtaatgagatccccatcacggagagatccaagcactcctccctggccctctgaatgatgttgctcaacactttggatccaggacttccatttgtaccctgtggaaatcatccaaaatatggacaaaatgggcacctacccaaatgaccaggtatgcactggttcagtaatgtatggctctatctatatgacagagtaatatgcaagcattaaaaagttaatctttagcactttgggaggccaaggtgggaggactgcttgaagccaggagtttgagaccagccagggcaacaaaatgagacaacatctctacaaaaaaaattttttaaattagccagttacagtgacatgtgcttgtagtcccagctattcgggaggccgacgcaggagaattgcttgagcccaggagttcgaggctgtactgagctgaattgtaccactgccctccagcctgggtgacagagcaagaccccatctcaacaacaacaacaaaaaaaaatcaacctttagaaaagatttttgattgcataggaattgcttcgctatcaatagcgatgcacagtatacaaagatttgtggtatgacatcaacatcaaaggaagatgtttaggaagaaagactaggatcatgtgtgtcctttggttctctcgctattttttgtactttccagattttctacaatgtgcatgaattaaatttataagttctactaagcagaaaatacggcaatagaagagataaactaaagtgagtgagaatagcccaagatgccctggagatcagcgcaaagatcatttttgtaagctccaggtcacttgtcagttttcttcatagagaaccatggaatttaattaaatttagaagacattcatgaggtccttaagaagcacgaggctctgtgctagagtctgactttcagaagagatagggagaaggcaaggacttggacaaggaccatccacagcaagatgtgaccaggcttttgtggatgaagagaggaaatctggactctgagtggccccaaatacagttatttcaccagggagtgggatattctctacaattctgtgaataaaattttcttggccaggcaaagtggctcacccctgtaatcccaccactttgggaggccgaggcaggcagatcacctaaggtcaggaggttcgagaccagcctgaccaacgtgaaacgccgtctctactaaaaatacaaaaaaaaaaattagccctgcgtggtggcaggcacctgtaatcccaacgactcaggaggctgaagcaagagaatcacttgaacccaggagacagaggttgcagtgagccaagatcacaccactgcactttatcctgggcaacaaaagtgaaactccgtctcaaaaaaaaaaaaaatttttttattttgttcacctaaaaacaaaagttgacaagggaaaacatcacacaacttggttcaacaagacttgatggaagagtctcttttctcagggtcttgaaggcagaatggcagccagccagtctcctgtgtgcctcttgctgagaaatccttaaagcccgattagacagaaacatctttgcagagcagacctttaggaaactgtttttgaaaattcaagaagaagcagtgctccggtgaaaacagatcatgtgacaagatacttgctgagcaaaagtctcaaaagcatatggatgagtgaatgccatcagcttcatacagccagaaataaaatgaatctccttcctttctgcttggaaggcttacggacgtggtttctgtagctcattagctattaaaattattaacaaattattattttcagttgaaagtggttacggtattcattattcctcccatgccaagactctctgtaatttactcagaacatgaattatccaaagcaatccagagtttctaaatagttttggaccgggttcactgcctttggctcagcaaacctgtcagggctgggtggctaaaggtctccgttacataatttactggtaacttaattgagactaattactgtgtctcatttgcctgcctgaagaacatctgcccggcagctgctgtaactgcgtttggttggggtgtttgaatctttttgtgatgtgaaataaagggcatgaatattttaatgtagacttatcccactgtcactttttataggaaactgctggttgttttattggccagcaacattaatacgaactttctctccagtgtgccagagccgaggtttagggtggactcagcacacgctgccttagtggggtccaccgccgaggaggaggtgggggctgtggctaagtcagcacatggggttgtggtgcacgcagctcctggactgctctgtgatatgcctgctgggggcctgcatccatccagaaggggacactgggtgataacagattgaccatataggatcaatcgttggcacatccacgtgagaaacaaatgagtttcaacccatttcacagatggaaaaactgagcccggggaagtttagtagccaaggtcaacaaagacttagcctgggagcccgaactagatctgagcctcttgactcctaggagcacccaagccatagcaaggtcaggatagtcttggcaggaacggtatcatttaggccatttggagagcctcagatgagccagcagtggaagagagaacatctaggacctgtggaggagcaggcgcttgacattggccaaccgagaaatgaggagggcgtgcaggcagagggaccggtgccagcatgtctgagtgaaggaacagccaacagcctgggagggaggagcacatgtggctggccagggccagggcgacaaggcttgttccccttaccttcatctaccctggtacttctttttcttagtccagagtcttatttttgtttctctgcatatattcctgaaaacagctgcagtccttgggtggcactatgaaggagcgtggactgaacgaatgagtaaatcatcagactggctgggaccggaatgctgggctcaggatatggaaggcattaggtactagggagccgtcgaaagtttcagactggagctgtggcagagaagcataggttacttggaagggaaaagagattacatgtttgtttttggggaggcagtgcagttaggagactgttatggcaccctagcgaagggtggccatggatatggggaggggaaggcagatttgagatccttcgtggtggttggcttggtgggacttagtggttgcttgaacgtggcacagagagcagtccaagatgacgcccagatcctaaccctgcatgtctggtctttggaaaggaagtggccactaggcttcagtgatggggactagcagagtggtctgtgacacgcacacccacccagaaccacaggcctggtgggactccctgctatcctctaggctggtgaacacatcggcctgaagcctcccaggtggagagtcaggggtcccctatgccctgttccctagtatctgaaggaacatggcatagataaggtcctcaaacagttatttgtaagtgagccatgagagggaagaagccacagactgaaccaaggaaagagccaagctagcttagaaaatgggggaggaaggagatagagaagtggaggggagaacagcgaagctcccagcactggagaagcccaggaggaagcaggagaaaatgaggaggagaggctgccagtgacaaagctgtcatctgtactaaagatgattatgacacgtcatggtctccaaacacccttagtcacttgagtcagtgcatggagatagacacagccgaacgccagccactgggtcaggatgggcgccctgggcctcagccgtctccacatggctctagcctggatgtctgttgcccctgggaaacctcttttcaagttcaccatgaacatggactttataagccataactaccagggtcactgcttctaacttagcagcagcatgttgagaggcaccaggaactcaaaatagacccacggagggtcaccttgcagcttgttgtcaggggcctggctggctcctgatggctctgggggagtcagggagtgaacctgcagcttgcagttaaaggtagttgtgggtggggattcaggcagagctgtgaattcccttgctcgtaaagctgcatgccagagccccaggcagccagctcagtcctgttggagccctgcctctgccccttcgaacacagttgctgagggagcgcttcccctgtgtcgcccttacaggacaagcgagctgcctcactcagactgctgagcacctccctaccttgccccaggacattttctgagatccttgtcaaattctgaatattttcatgtccaaagtggagcagcagcgggggtggaatgctggggaggtctgcttgtgtgttttcacattgaataattttgtggggccgggcagctgggccagcagggcagggcctcccactggtgttaatccgtcccctgggtgttttctgcagcctacttggttcaggactttggtgtttatttctgatgggtacgattccggctgctgtcctgggaaaactatgccacgtcattatgctttgggagtcttttttttccaaatcttaggacaagaggcttggggctaacctgttaagttagcatgtgtgagtagtaggaatttggtgatcaaaacaaagaaagcaatgacaaggacccgtgtgcaggccagtggtgcagaatcatctccaagtgtgagctggagggagatgggcatctggctgttggagcttaggctcagaaccacggcagctgctgcttcaggataggaaagtgtaaagtcctagactagaggccacagggccaaattccacagcagacgtagcttggcccacacaggcgtcttaaggttttaggattcatttccaacatttttaaatcaggagattgcagtaagactctggattttcagccttacttttaaaaatgaacggcgtggcaacatttggcctcagtgggctggagcgcaggtgtggtcatacaccgggtagcacatgttcagttgcccgtggtctcaaccactcactgcagccaaggtcagttagtacataccagcctgactatagcttctgtaagtatttttcttataaaaattttcatggtacagaaaagtaccgagattaactaataaacacgtctccacttcccagttttaacaaatctttacaatcgctgtattcatttcacatccgttaagtcataatatgttacagatacgttggaagtcctttttgaccctccctagtcccgttctcctcctttcccctgttggtatgtatgcatctcatcccacccaaattttcaaacttgcactatatatgtatatatccacaaacagaagagagtattgtttgttgtgtcttaaatagtctcttagggtatgtacatctgtcttgcccctgggaactcgccgtgttgctgctgtagctctttggcattcgttttctatatgatttcgtcttacacatttattcattctgccatcgatggacacgtaggtggattgccatttgaggtttatacaattatggagtgaatgtcgttttctggttttcttgggcacatgtgtaagaaactgtatccctagaagtggaataaggcataggttatacataacttgagctttactccaaaggggttacctgtagatagcatctcaccagtaccgtgtgagaacatttctcccatcatggccaaatgtggcttagtcacatatttttagtgttgtcagtctgatagatgtgaaagggcacgtcctcatttggtttttaaattcccctgctctgtggtgaggttgaatattttcagatgtttgggggatgtattagtctgttgtcacattgcaaagaactacctgagactggataatgtaaaagagaagaggcttcattggcacacaattctgcaggctgtacaggaagcacagctggagaggcctcaggaaacttacactcatggcagaaggcaaaagagaagtaggcacttcctacctggctggagcaggaggaagagagagaagtgggaggtggttcacacttctaagcaaccagatctcctgagaacttactcagtatcatgagaacagcaaaggggaaatcctccctatgatccaatcacctcccaccaggcccctcctccaacacgaggaattacaatttagcatgaggtttgggtgagggcccagagccaacccatatcgggagatatttatatttcttcttaagtgatttttttcttttattgtttgcccattatctgattaggcaatttgtcttctcttagttgatttgtatgttcagctttacaaaagaaaagaatgctgacacaggctacgacacagatgcacattgaggacattacgctaagtgaaaacccgtcacagaaggacaatactgtatgattccgcttatataaggcatctagagtagtgaattcacagaaacagaaagtagcatggtggttgccaggagctagggagagcaggaaatagggagttattgtttagtgggcaccgagtttcagtgtaggaagatgaaaagctttagagatggatggggttggtgtctatacaataatttaaatatacttaatgtcactgaactgtacagcttacaaatggatttgatggtaaatttcattatgtatattttaccacgacaaaaaaacacacataatgaaataccacttcacacctactagcatgactataatcaaaaaagacataataggaagtctgtgtgatgatggtgataatctagaacctgcaagaacaagccagcaaccccaagaggactcacagacccactgaaggaagcagactgctcctgcaggacccaggagacactccaaatactgtgagtgcccaaactgtggaagtgggaaagggagagcatcctctcccaaacatacacccccactggagaaaatgaaggtctgttttcgggggaagtttccatccttacctggagctgagttagtttacagagtcgagtgaaatacagaagtagaggaagcagcgggaaaggccctgggagctccctgggtccccaagcaggccattcctgcctggcaccacagggatccatcgggagggaggccagaggagaggctgaacaccacagggagaaggaagtctccagctgaactatgtaataatttgaaccgggcaagaagcctcctggccagaacttggggggagggcacaaatccagtgtgcagattccacaggtgggggcagaaacaagcccttttctttcacagctgggaggcagatagcctggggcaagttctcaagcctagcttgcccactgcctggaaacagactcggggctgttgagggggcacgttgcgagtgagaccagccctttggattgcgtgggagctgggtgaggcctgtgactgccggctttcccccacttccctgacaacctgcatgactcagcagaggcagccataaccctcctaggtacacaactccattgacctgggaacctcaaccccatcccccatagcagccacagcaagaccagcccaaggagagtctgagctcagacgcgtccacccctgcccacacttgaatgggccttccctatccaccctggtaactgaagacaaatggcatataatcttgagggttctagggccccacctgccactgatccctctccatactaccatagctggtgctctctggaaagcatcacctcctggcaggaggccaaccagcacaaaaatagaatactaaaccaccaaagctaagaaccctcacagagtccatttcactcccctgccacctacactggaacaggtgctggtatctacagctgagagacccagagatggttcacatcacaggactctgtgcagacaagcctcaataccatcctggagccgggtagacttgctgggtggctagacccagaagagagacagcaatcacttcagttcggctcacaggaagccatatccataggaaaaggggcagagtactccatcaagggaacaccccatgggacaaaagaatctgaacaacagccttcagccctagacctttcctttgacagagtctgcccaaatgagaaggaactagaaaaccaactctggtaatatgacaaaacaagtctctttagtacccccaaaaaactcacacttgttcaccagcaatggatccaaaccaagatgaaatctctgatttacctgaaaaaatattcaggaggttaattattaagctaataaaggaggcaccagggaaaggcaaagcccactgcaaggaaatccaaaaaacgatacaagaagtgaagggagaaatattcaaggaaatagatagcataaagaaaaaacaatcaaaacttcaggaaacattggacacacttacagaaatgcaaaatcctctggaaagtctcagcaataggattgaactagtagaagaaagtaattctcagagctcgaagacaggtctttgaattaacccaatccaacaaagacaagaatgagaaagtatgaacaaagcctccaagaagtctgggattatgttaaacaaccaaacctaagaataatcagtgttcctgaggaagaagagaaatctaaaagtttggaaaatatatttgagggaataatggaggaatacttcgccagccttgctagagacctagacatccaaatacaagaagcacaaggaacacgtgggaaatgcatcgcaaaaagatcatcacttaggcacattgtcatcaggtaatctaaagttaagatgaaggaaagaatcttaagagctgtgagacagaagcaccaggtaacccataaaagaaaacctatcatattaacagcagatttctcagcagaaaacctacaagctagaagagattggggccctatcttcagcctcctcaaacaaaacaattatcagccaagtattttgtttccagcaaaagtaagcatcatatatgaaggaaagatacagtctttttcagacaaacaaatgctgagagaattcgccactaccaagccaccactacaaggactgctcaaaggagctctaaatcttgaaacaaattccggaaacacatcaaaacagaacctctttaaagcataaatcacacaggacctttaaaacaaaaatacaagttaaaaaacaaaaagaaaaacaaaaaaaagcaaggtacacaggcaacaaatagcatgacaaatgcaacggtacctcacatcccaataggaacattgaatgtaaatggcctaaatgctccactgaaaagatacagaaccacagaatgggtaagaactcaccaaccaaccatctgctaccttcaggagactcacataaactaaagtaaaggggtggaaaaaggcaattcatgcaaatagacagcaaaagtgagcaggggtagctattctcgtatcagacgaaaaaaactttaaagcagccgcagttaaaagagacaaagtgagacatcatataatggtaaaaggtcttgtccaacaggaaaatatcacaatcctaaacatatatgcacctaacactggagcttccaaatatataaaacaattactaatagacctaagaaatgagatagagagcaacacaataatagtgggggacttcagtactccactgatagcactagacagttcatcaaaacagaaagtcaacaaagaaataatagatttaagctataccttggaacaaatggacttaaaagatatatacagaagatttcatccaacaactgcagaatacacattctattcaacagcttgtggaactttctccaagatagaccgtatggtaggccataaaatgagcctcaataaatttaagaaaattgaaattatatcaggcactctctcagaccacagtagaataaaactggaaatcaactccaaaaggaaccttcaaaatcatgcaaatacgtggaaattaaataacctgctcccgaatgagcatcgggtcaaaaaggaaatgaagatggaaatttaaaaattcttagaactgaacgacagtaatgacacaacctgtcaaaatctctggaatacagcaaaggcagtgataagaggaaagttctcagccctaaacatctacatcagaaagactgaaagagcacagactgatattctaaggtcacacctcaaggaactagagaaacaagaacaagcccagcaaaagaaaggaaataaccaagatcagagcagaactaaatgaaattgaatttaaaaaaagataaacaaaaagctggttctttgaaaagataaataaaattggtagacctttagcaagagtaaccaagaaaagaagagagaaaatccaaataacctcattaagaaataaaataggagatattacaactgataccagtgaaatgtgaaagattattcaaggctactgtgaacatctttatgtacataaactagaaaacctagaagagatagataaattcttggaaaaatacaacccttctagcttaaatcaggaagaattgcataccctgaacagaccaataacaagcagcgagattgaaatggtaatttaaaagttaccaacaaaaaaaaatccaggaccagacagattcacagcagaattctaccagacattcaaagaagaattggtgccattccttgtgacactattccacaaaatagagaaagaaagaaccctccctcattcattctatgaagccagcatcaccctaatgccaaaaccaggaaaggacataaccaaaaaagaaaactacagaccgatatccttcatgaacatagattctaaaatccttaacaaaatacaagttaactgaatccagcaacatatcaaaaagataatctaccatgatcaagtggatttcataccagggatgcagggatgatttaatatacacaagtcaataaatgtgatacaccacataaatagaatttaaaacaaaaatcacatgatcatctcaatagatgcagagaaagcatttgacaaaatcccgcatcgctttatgattaaaactttcagcaaaaccggcatgcgagggacatacctcaatgtagtaaaagccatctatgacaaacccacagccaacacagtactgatggggaaaagttgaaagctttctgtctgagaactggaacaagacaaggatgcccactctcactactcctcttcaacatagtactggaagtcctatccagagcaatcagacaagagaaagaaataaagggcatccaaattggtaaagaggaagtcaaactgtgactgttggctgacagtatggtcgtttacctagaaaaccctaaagactcctccagaaagctcctagaactgatcaaagaattcagcaaagtttccagaaacaagattaatgtacacaaattggtagctctaccatataccaaaagcgaccaagcagagaatcaaatcaagaactcatccccttttacaatagctgcaaaaaaataaaatgcttaggaatatacctaaccaagaaggcaaaagacctttacaaggaaaactataaaacaccgctgaaagaaatcatagatgacacaaacaaatggaaacacatcccatgctcacatatgggtagaatcaatattgtgaaaatgaccatactgccaaaagcaatctacaaattcaatgcaattcccatcaaaatactgctatcattcttcacagagttagaaaaaaacaattctaaaattcatatggaaccaaaaaagagcctgcatagccaaagcaagactaagcaaaaagaacaaatctggaggcatcacactacctgatttcaaactatactataaggccgtagtcaccaaaacagcatggtactggtataaaaataggcacatagatcaatggaacagaatagagaacccagaataaacccaaatacttacagccaactgatcttcgacaaagcaaacaaaaacataaagtggggaaaggacacccttttcagcaaatggtgctgggataattggctagacacatgtaggagaatgaaactggatcttcatctctcacctaataacagaaatcaactcaagacggattaaggacttaaatctaagacctgaaactataaaaattctagaagataacgttggaaaaacccttctagaaattggcttaggcaaggatttcataaccaagaactaaaaagcaaccataataaaaacaaagataaatagttgggacttaattaaactaaagagcttctgcatggtgaaaggaacagcagagtaaacagacaacccacagagtgggagaaaatcttcacgatgtatacatttgacaaaggactaatatccaaaatctacaatgaactcaaaacaataagaataaaaacaattgcatcaaacagtggtcaaaggacatgaatagacagttctcaaaagaagatatacaaaaggccaacaaacatatgaaaacaatgctcagcatcactaatgatcagggaaatgcaaatcaaaaccacaatgcgataccccattactactgcaagaatgaccataaccaaaaaatcaaaaaacagtagatgttgacatggatgccgtgatcagggaacacttctacactgctgatgggactgtaaactagtacagccactatggaaaacagtgtataggttccttaaagaactgaaagtagaactaccatttggcccagcaatcccaccactgggtatgtacccacaggaaaagaagtcattatacaagaaagatacttgcatgtttgtagcagcacaattcacaattgcaaaatcttggaacctacccaaatgcccatcagtcaacaagtggataaagagactgtggtatatttatatgatggaatactacttggccataaacaagaacgaattaatggcatttgcagcaacctgagtgagattggagactgtgcctcagtttcctcacctatagaatggatctttataggatcaatgcaaggatcaaataagttgaatcatataaagtgcttagaacattgcctggcacataggaagctctgaaaaaggcttagctggtataataactagagaatctattttagaaatactttcccttaaaccatattttataatagcaaagtgttgaaaatcttcctgcctgcctttgttctctcctttccttccttccttcttttcctttcctcattcctccctttcttctttcctttcctccttccttccctcccttctgtccttactgcctttccttctctccctcccgtccctcctcctttccttccctccctccctcccatccctcctttccttccctcccctccctcctcctttacttccctcccttcttccttccttcctttctgtctctttccccagcaaatgagaactaaccatcatggcccaagaattttttcaggaaaacatggaaagaccctggctgatcacccatctcgattcttggggttgaactaattaactgaagcctcaaaatcagtgttttttatacaggatttaaggctgaaagtggtttctcagtagtcctcactgttagcaaaagacaacgttgtctgcgtcgcggggcctctctgcacgtagaaccgccggcttccggagacgcgcacattcacagatggtgccgtgctcctcacagtgtgctgtagattttcatttcctctttcaaaaagcaaatatgggaataatattacttttcagggaaatgtatatgagaactcataattctcgagttttaaatggagaaaggctgcatggaagcctcacgtgtgcctgtaaagcgtccctctgggtcccctgggagaacattgcagcccagctagtaaagtcccagttgtacctcctcacctcactcctttgcagacatctgttcaataaaagcagccacaggtcttcaggactatgcatggcacatgttaaagctgtgttttggttgttctcgtaacagagttgctggctgtcatctgccaggagctgtgagagggacccagtctcaggcagacaggaacctctgacgctggtcttttttgggaagggcctgggagcatggcctcttggctggccagctcctgccacagcctctcacccataggctcgcagcacacgtggagaacagtgttgcaggtgcactgggaagggccttgcctcccacagcaaagcagaacagagtgcttgctttctccctggtcctgcaccacggagagaaggaagggatgtgcatgcctggagcatcccctgtgcaggcacctcctgatttccccatgcccaatatatttacttatcattcagtcctcacacacacgcccactgctcttgcccctgatttatgggtgaggaaccctgtattagtctgttctcatgctgctaataaagacatacccgagagtgggcaatttataaaggaaagaggtttaatggactcgcagttgcacgtggcaggggaggcctcacagttatggcagaagccaaaagagaacaaaggcacatcttacatggtggcagacaagaaggcatgtgccggggaactgccctttataaaaccatcagatctcaagacttattcgctatcttgagaacagcacgggaaaaaaaccaccctcatgattcagttacctcccaccaggtccctcccacgacacatgggaattataggagctacaattcaagatgagattcaggtgaggacacagccaaaccatatcaaactcaaagctcagagcaggtaaatccaaaataggattcagtactcagaggccttcagctgtgagtgttctgtccctcatgtctaaatcatgtaaatctgttgaaagttagaaaaaaaaattaagatgaatgtgaccatctctgttttggttcggaccgtccacatagactgtccattccagagggctttgggggaacagcaactcctcttaacaagaccgatgtctggatggagagtaacgggcacaacagttgtaataagctggggttgatcgggcctgtggagtgtcaggcctgggctgagtgctcggtagaggtcacctgagtcacgcctccaacaagcctgtgacatgagagcaacatctcacaaagaaggaaactgaggcttgagcacagactcccccaaggtggcacagctggggagtcagtggggtgaggacttgagtctgggtctgtccaggtccttctgagaatttgagaaggtctgacttcagtatgtgggcacctggaactttcagggtcatgatgaggctagtcaggtgcacccgtgctggaagtaggattatatgaataaaaaaagaaagcccctgaactgaggcacagaggacccacctacataggaataggggagcccgaggccagtcttgctgcctctccaagttgttttctccctctgtaaagggaaaccagcaggtctcatgcctcttcctctgggagttacagtgggcatgagaatgagacagcgggtagaaaaggacagggtatgccaggcgcagtggctcacatctctaatcctagcactttgggaggctgagaagggaggatcgcttgatcccaggagttcaagaccaggctaggcaatatagtgagaccttgtctctacagaaaatcaaaaaattagccgggcatggtgacacacgcctgtcgtcccagctatgcagtaggctgaggtagaaggatcacttgagccccaagaggtcgaggctgcagtgagccaagattgcaccactgcactctacactgagtgacagagtgagatccagtctcagaaacaaacgaacaaacaaaaacggcacaaactggaggggtgaccacatgtgtgttagagtcacagggctgacccaccaggggtaggtgtgggcctgttttttcaggctggctcagggcagacaataaatgagaagtgagaactctgatccatctcgctttccagatcagatgcccaagtctccctgggacaggaagggacgagatcactcttcaggctgggctccttgtcaggatgccataatccaccagcccaggctcgtcaccagaccccaaggggagatggcagtccagcgctggccaaggccaagccttcccctcaggtgtcctcctgggcccccgggccctggcctccttccccttggctgccccatcttggatattgcctctgatgagtcacgggctctactgtttggcccacgatgactcttccatgaggcaccacctgtgggcagggtcccattcccatgtgtctgcagcagcctgttctcagtggctgcttctacctcttggtcaccctgggtgcttcccctggccacagaaatccccttgtcctctcctcttcctcacacagtacactaggccagaggctcacaggcccccacacaccccctccgactcccaggcacctctgggcaggcctggtttccaaagttcagtgcccctctaagagggagggtctgcagagcccactcagcaagcatcagaccacgtttcttaagaggcattgggaccaccctctccttcacccatccatccctgcttccccctgaggcctcttctgggccagcagcctttccctgctgccaaatccaaagatgcctttcaggccccagcactacaggtgcagtcccttcccggcatccctgacctggcggtcaccccctctgcatctcttctggaggctgtcattccccccaggtgcttgcactccccaagcccctgccctccaagctgtcttctctgtgtctgcgctgtctggatgatcccttcttacctttggtttcccccttgacctcctttgctcatgactttccagccctatgtctccaacctgaccgcaccccaagctgcagactgcacctgccgacctgcctgacactgcacccggtagcccctcaacccggcctctaaagcagcgccacccttccaccgcaggccagctcctccccgggtgctccttctcagtggaggtaccaccaacattcttgggctcagagtcctgagcctgacatttcttgccttctttctctctttgaccccacataccaaagacgctgtcatctccaccctttaagagtcttccaaccagggaggctgaggcaggagaatcggttgaacccaggaggcaaaggttgcagtgagtcgagatcgtgccattgcactccagcctgggtgacaacagcgaaactccatctccgtctcaaaaaaaaaaaaaagtcttctaccaaggcatgttgtccccttgccaccactgccttggggaaagccatcatcttgccctctggcacatgattcctgagtgtaccaaaggccacctctctcccaccccagccttaaggtgtggaccagacatcccagacttgtcagttgcaccacagtccctccacctcctggacattgtgagggcaggctccctccgtctgaatgctgagccccgcttatttggttgaccagctccactttgaccttcaggacccaacccaagctccagttccttcacagcacttgtcagatgttaaagaaattgtctgtttttatgtttctcccacccctgaggaccacacacttgcctgaggtttgtgaaggtggggaaactgagtcaggtgtcccagcccttggttcaggactcaacgtgaggttgacactcacgtatctgggaacaaagaggctgagactgagcgggttgaccgtgccagtggctgcttcctttggcctggcctgcattttctggagcttgggcggtgtttgccaccctttttatgctgccatgttgtatgattgacttcttgatgccctgcctggaattggcctgtctctaacagatgctcagagaatcacatacaggcacctgtttccttactttgattaactgagtgaatgtggggaacattcctagcacagagattggcacagattagacactcagtcgataccagcgccttcttttgcgcccattctgaggaggcacaaagttaacactggacccctggacaaaccacttgttagcccagattgtgctggaatacaacatctcatgctgttttttgataatttaaagttgttgaaaataacgacctaccagggctctctctttggctacctgcgtttgagattccctctatattcaacataaaataactgtgtcagaaaagtgtgaccctgatgatggcattgtttctttgcaacaactgtcacatcagcagacctcacaaggcctttacctagtttaaatctcagccaaatcaagatgtaaatagaaattgaattttaaataggagctgagttttttcagaattgggaatgcagtgagtgtgtggttggcagaataacggccccacaggtgtccacattctaatccgtagaacctgagaatatgtggcctcctgtgtggccaagaggagttaaggttgcagatggtgttaaggttgtggtatggattgaattgtgtcctcttcaaaattcttttattgaagtcctaacccccagtatctcagaatgtgaccttatttggaaacagggtcgtggcagatgtaattaggtaaaatgatatcatactgaagtagggttgggccctgatctgatatgacaggtatccttataagaagagggtcatgtaaggacacagacacacagaggacactgtgggaagatgcaggctggggctggggctggggctggggctggagtgatgcttctgcatgccagggaacaccaaggcttcccagccgccaccagaacctaggagagagacacagaacacgttctccttcagggcccttgggaggaccagccacactgacaccatggttttggacttctggcctccaaaactgtgagggaatagattcctgttgttttaagccacccaattcgtgatacttttatcgacaatcctagcaaactaatacaggttggtagtcagttgtgatgcttttattagcagtccttttatcggcaaattttaaggccaactgattatcgggttggtaatcagctggccttaaagtagattattctggattatctgggtgagtctggggtcatcacaagggtccttccaggtaggagatgaggcagaagagaaggtcggagtgacacagtgtgagaaacactcccccaccactgctggtcttgaggatggaggaagacgccccaagccaaggagtggggcagcgtggagctggaaaagaaggaatggggcagcatggagctggaaaaggcaggagacagattcttccctggagtctccaggaggaaccagccctctcagcaccctggttttagatttgagagactcatgccagacttctgacctccagaactgtaagataataaatctgtgttattttgagccattaagttgggggtaatttgttacagtagcactaagaatacagggtctcatatggtcactgagctgcctgaggcatctcattaggatgatttaacttgaagcatatgcagaggaactgagtcagtgctaggcaggaaaggaagcagagtcgcaggaggatcaggagaaggggtgccctgaattagagaagcgttaactgtgacttcctaaagaattacagtttcagccaggcgtagtggctcatgcctgtaatcccagcactttgggaggccgaggcaggcagatcacttgatgccaggagttcaagaccagcctggcatacatgccaaaactccatctctactaaaacttcaaaaatgagcggggtgtggttgctcatgtctataatcccggcactttgggaggccaaggcgggcggatcactggaggtcagcagttcaagaccagcctggccaacatgggaaaaccccatctctactaaaaatacaaaaattagccaggtatggtggagcacacctgtaatgccagctactcaggaggctgaggcaccagaatcccttgaactcgggaggtggaggctgcagtgcgccgagattgcgccattgcactccagcctgggcaacagagtgagactccactcaaaaaaaaaaaaaaaaaaaaaagaattacagtatcatgcttttaagaagagcagctacctcaaacttggctaataaatattgctgttaaagttttttggggcttactagtggaaaaaaatagggcttacaatgtaattggaatataaattgttttacggaactacagttcctttcccaaattactggatttaaagtcaacgtgatttgactgtggtggtgagttgcacagtgtcgttcaagtgtcgtaggtgggctcctggagccagggggggttgggtgaaatgatttctttatgccaccaaaaaaagaagttttaaggaagtcattttctgcccatacctcattgagatttgtcaagatcagaagcaaaaagtctagctgaaaaacagctaaaatacgctgcggagtgcttgtacacaaagtccacacagcaacccccgtagacggctcctcctgcactgcaggtgtgaacgtgtgcaccccgggcacagcgctctgctctccccttcggctgcctgcggcttaagaaacacttcgcttctgcgacttttcttcactgatttacaacttgcttctaaccacccactgacatcattcttttaattgtggtaaaatacacataaaatttaccatcttaccatttgtaaatgtacagttcagtggcagtaagtacattcaccttgtgcagccatcaccaccatccaaacacagaacttttctatcttcttcagctgaaggtctgcccccattaaacactcactccctattccccttcccctcagctcctggcaaccatcattctactttgtctctataaatctgactgctccagggatctcacataagtggaattgcacaggatttctcctttggttattggcttctttctgttggcatgaagctcatccatgttgtagcatgcatcagaatctcctttttgacaactaaataatattcccttgtatgcatatactacactttattcatcctttgatggacacttgcatcgtttccaccttttggctattgtgaataatgctgctgtgaacacaggtgtgcaaacatcttaccataccgttttttaatctatccacatagccattcagtggctatgcatcattctaacactggatgatagagtttaaaactgagtaaaacaggatacagtggcctcgcttactcgcggccaaccctgctgactgagactcagctcagacatcacttccccaaccctgaggcagagcaagtcgcctccctgggcccccacagccccgtgttcacctcctctgcagcagtgagcctcgtatactgctgatccggctggttatgtggctcctgtgggctgagccgtatttctgactatacatctagaaccccaggtggagctgggaagtagaaggaagggcgtggagcaagggctgtgccctgagctgcctggtgtgggacccatggtcgtgagtgcatttgtgctcctctcttatggggagactcgaggtcccccatggtggggttgggaggctgtgctctcggcaggtggagcttgtttttgaattccaggggccccaggacatgagagtttatcagtccatctggcgatgcccattgcaccataggagggaggcaggggcagccccagaggaggggtgaatggcagagcatccctggctgaggagcagggcggcacccgtgggctgcacctacacctcatgtgctgggggctgtgtaaccctccccctgtgaggctctgggctgtgacaaggagggagattgtaagaactccgcgggaaagggctggacagcaggaaggagggatgcatgaggtatgttccattctggcacaagaagcaaaggagagaagaggcaggacagccagccgcccctcactgctctgcaggaatctcccatgtgaaaacagtgcccctcccagggccatttctccaaattgctcaaatcaagaaatcacttttgtgggaagcctcttaaatctacaaaactttttgaatgacatttttgctttttccacgttcctcttgactctgtttccccgcagatctggctttttaagtcagcgaggtgacggcggatgtagagacatcagggcaggactgctgagcctcgcccagctcttccctcgtccccccagtgtgtcctggatgtggcctctgtgtcaaccagagtcgctgctcacgtccactagagcacctgccgtggtcacgtgctgggaatggccatgcaccctgtggcctacggcatgccaagtggcatccccatgagcaagacagaggggccccacttctcaggcttggccctggaagcacagcacaagcaaaggcgggagcagactcaaagccgttttcacagctggggtcagcacaatagcgccaaacaggtctcaccctaaagcctgacgtctttattcacaaagtcaactgcaaaagggcaggacaaaggagatcttgtgggagtcagttcatgagagacaaaaagcagcccaggatggggaagttaatatgtttaatctggctgcttaaaaatatagaaatagtatcaagttggacaacattgatgaagtcagagtctctattttagaaaagaaaatcatcacattcaaatttctttttcttttttttttttttttttttttgggtttggccttttttttgagactgagtctcgctctgtccccaaggctggcaggctggagtgcagtggtgcaatctcggctcactacaacctctgcctccccggtccagacagttctctcacctcagcctcccaagtagctgggaccacagatgcacaccaccacggggggctatttttgtattttagtagagatggggtttcaccataccggccaggctgatctcgaactcctaacctcaggagatccacccaccttggcctcccaaaatgctgggattataggtgtgagccactgtgcccggcctagacttgattctgtggagtacttgtaggttcacatcaaaattgagaggaaggtacagagagatttctcacacactgcctgctgcaggcacgcatggtctccccgccagagtgctacattcgttaccgctgagggacctaccctgacacatcacgacatcatcgtcacccacatctatggttcatcttaggcttcattctcagtgttgcacattttgtgggtttggacagatttatgacatgtttccaccgttatagcatcatacaaagcagtttcactgccctaaaaattctctgtgctccaaccactttccttctttaaaaaaaaaaaaaaaaggaaaagagaccagtttattttgtgattgtgagcaaagaaagaaatgacacagctaccaatctcctattctgtgcctcttcttcccaagtacagacattgttttccttcaggagagatgtggctgattctagattcaggggtaatgggcatgcctggatcatggccttcatcattctcaccctggggagagctttgggtcctctgaaggcccagaagtctagtgaacctggctgatgctcagtaaatgtctgccccgctgaatattttccatatctccatccaagagcaccttctggtgttcttccctctattttcttgaccatagcccccagcaggcataaggtctatgtcctggagccaatacttctacagtgatgattctagaaaccagtctgttctgaaagctttcaccatttctcaggagcaatgagagaaataagcatacgtttttattcattttaaagatgtctcctttatttgagactatgtctcttctgtatttttagtgttaaggtgtattctggggagcagtatggttggggccgggcacagtggctcacacctgtaatcccagcactttgggaggctgaggcaggtggatcacttaaggtcaggagttcgagaccagcctgaccaacatggtgaaacccgtctctactaaaaatacaaaaattagtcaggcgtggtggcgcatggctgtaaacccgactactcaggaggctgaggcaggaaaatcgcttgaacctgggaggtggaggttgcaatgagccgagatcgtgccattgcgctccagcctgggtgacaagagcgaaactccatctcaaaaaataaagaagatagtggctgttttttagtatgtgtgtgcttattgtccctatccatcacattcattcttgctgcttccaggccacatctgggccatgttgtcctctggaagaaaagtcgtgactgagtagaaaatgaatgggagggattgaacatctgccacacaaactcttggccaaaagaagagaaaacttaaaggggaacaaaagaactgtcttcacatatttaagaaggcctctgggttactccaaagaccagaactaggagaaatgaactaggagaaatgtgtagaatttagctcaattctcttcgtgctgagtgtggccaggtgctgagatgggaggctcatggccaccctgcaggagttctccatctcctaccaaggagacaatgacagcaatgatagctaagagttacatttacacgggcttcaggtgtgccagacactgttgtaagcagtttatggacaatgtgccacttgtcctcacaactgcaccccaagggagtcactgtggctcccatccctgccatgcgagccatggatccaagaagggcttcactggagttaggccccagaagcctgaggatagagtgatgattctgccaagaggattggaacttagctccagaggaggtgctctgggacaaggagggacaacctggggtggagggaggagcccaggtggctctgtcttctcagcgccagagatgccggcgccaccccagttggttcagaccagtgccgtcgtcactgggactgccgtaggagcctcctctctggtctccctgccgctgcttctgcccactataaactggtatccacaccgagccagtggtcctctcagagccgaaaggaacatgtcactcctctctcaaaaccctccagtattccatcttatttgaacaagagccaccagggccagccaggccctaggtatctcacccttctgccccccaaatcccatcctttcccctcgctctccccttcctcactccgcctccaccccgccagcgtgcccctccaccagggcctttgcacccctgtgacctctgccttggaagccttttcccacgtagtcacggggctcacttcctcccaggctctcctgagatgtccacttcccagcgaggccttccctgcatcctgctgtaagataacacccccacccactccctgttctgctcacgctgcttgacttgtctctagagcacttgtgactgtgtgttacggtctctaatctcatttagtatatttgttatagatgctatggtgatatatatggttcagtggctatatatggtctgcccccctcagaatgtaagcttcagagggcagggactttgcttcactcactgcttcctcatcagaacctagaaggtgcctggcacgtgggaggccctcgataaatctgcagtgcctggatgggcagatgagccactcagctgggaccggaaagcgagagacagctggcaccgtccagtacccgttcaaaggatcctgccagtgggcaaaagcggtagacattgctcaacagtgggatggcccggcatggcatgatcagacttggtttggggcgggattcaggactgtttttgactaatgaggaggaactgagtggctgtcagacctggcagtgcacaggtcaagctgctttgtcaggtggcgaactcttggaagcgaggagtttatgaggcaggacaagaaagggcaaagccagttggctcatccagaaagcaagcaggggagatcccttagtgttcgcaaaagggcactggaagccctttgtgtgtcatgaggaagcatgattcccaagctgctcagctgctttccagcgccctgaggccaacagagatgcctaatgcatcggatcatcaggctatcaggcagggacctgaagttttattttttgtttttattttttgggggatacagtctcactctgtcacccaggctggagtgcagtggcgcgatcttggctcactgcaacctccaccccctgggttcaagcgattctcctgcctcagcctcctgagtagctgggactacaggcgtgcaccaccacgcctggataattttgtgtatttttagtagagacggggtttcaccatgttggccaggctggtctcgatctcctgacctcaagtgatccacctgcctcagcctcccaaagtgctgggattacaggcgtcagccaccgcccagcctgagccgaagttttagaagaacactttcagacgccaacctcaacagcctctgtcttcccatggcccacaacgtgccactctcaggcaccacagccatctccggagggcccaggctctggaaagcagggagggcctagttctggttaatcaagctgggaccggtgtgggctggggggttctttgtcagtggctgtatcaatcccctattgccgcagcaacaaacaactgcaacatctccatcactgacagtagcgcaggcggtagtggtgcgggctgtctgtagggacattccctgtactgggactgttctcccagcagagggtaagaagtaaagagaatcagagccaaaccacataaccacattcagagcttctgccgggacgccgccagcatcctcttcactcacaccctgtcgaaagaagcaggtcctatgacgacaagcagatacgtaattccctacagggaggccgtgaccagataattctgtctgccgtaggggtgttggttgcagaaagatgtctgtgctgaggagaccatccaaccagaggaccactcaagtcactccctctgtgccgatactctgagttatgtccagggttggctgaaaagcttcctgagtctgcctccctctctcccaccacagggcagcaattccaggatccggccggaaggccctccggagaggctggcctctcacccagtcgttctctctctctttcctcccgtctggcaggtgggtggcaggcccgtggagcccctgctcggcgacctgtgagaaaggcttccagcaccgggaggtgacctgcgtgtaccagctgcagaacggcacacacgtcgctacgcggcccctctactgcccgggcccccggccggcggcagtgcagagctgtgaaggccaggactgcctgtccatctgggaggcgtctgagtggtcacaggtgggtgcctgggcttgccaccaggactcagccacagggactccaacacggtgccatggtattggtgacattctggtgcctcccagccctcgctcgcccccaggtcagcttgaagttgtgttatagctcatgtgttcttaatttccatctcagataacagcctggctgcggaaacatagataccatgtctctgatgatgtacatgtcaacaccacagtgaaggactgtttgatcccatttcctatgaaaattctcacatcaagataggatagacagatactgaccgactttttaattctcctttgggtgtatttaactgtggtgtgctcaggctgggaaggtggtttcaaaggtttgcctttaatcccccagcagtctttgtagattacgagagtcagatgccaggagggacagcttttagtgtgcaagttggagttacaaatctcatgccataaaatgttttggaaagaagtggattaagccttaagtcttaactttgaaggttggtcctgggagtacaattttatctctggtgatgtcatccttcagggctttgcattgactttgtgttaatgattttgactgtttggctataaaactacaaaaaaaaaaatagctgaataaagggcaggcttccctcaggtcttccaccagcgtagtctagaaaactcagagacgctcatccaagacactcttcagtgtggaaaattttttaaagttccctctattgccaaacagttggaattattttgaataaaaaagtattccgcccatttttaatgaaggaaaagtctgccattggctgctctaaaacaaaggttaattttcaaacagatcttggcatgtatttgtttatagatcaggatttttagtcctacattttatgatattttaggaaaagagagtttgagattttgttgtttgatttttttgtctttgtctatgcttacgtttgtcagtttaacattagagggattttttttggccccttgctggaagggttgaggcaggtgttcagtcccctcccctttccagtactctaggtgagcctttgggttttaattgcctggctcttgatcgaagtaagacttgtgctttgatcagatcaaaaccataaattttccactcagtggtaaaatcctgtctctactaaatacaaaaaattagccgggcatggtggcgcatgcctgtaatcccagctacttgggcggttgaggcaggagaattgcttgaacctgggaggtagaggttgcagtgagccgagattgcgccattgcacttcagcctgggcaacaagagcgaaactctgtctcaaaaaaaaaaaaaaaaatccactcagactctttttatgggggaaaacaatgcttccccaccaagtctgacatcatcaattatcattacagccctgaagatctctacgtttggaaaatgtgagacaatgggagcaagatttaaagaaatttctctgtgtctgtatctatgtgcatacctaatcctaatcccgaacgagcaccacaccagtcagcctaactctggcttagcccaggcttgagcaaaatgcttccttctgaacatttaacctggaatcaaatcattccccatgggaagctcgcgaagctggtacttctgccgcttcccacgtgctgaagtcccaaagtgagactgtcttccgctggaagcagatgggtttcagtttcttaagggagagtttttattgacgtggtcgcttttatccaaccagctgtgttgattgctctcactacctactccccagcttcttcccgactttattagaagaaggatcaaatatccagaaggaaggaaaaggtagtgcgtttctcctgtcctcagcttgcaggccccgcccctgatgggaagcaaagagagagaccgaagggcaccctcctaggcccctttggagctggagccgtcctcagcagcctgcagcactgctcagacaaaggcttcaggagaatgggttgctggtcagagtttggttaagaaataggctggacattcagagcttgaaattcaaggggaggaggtgagcaatgcaaaatagaggccaggcaagagtgaacttaggcagaaatggtgcatgggttcctggttgcagaggagcaagttgtgtggatgctggtgccaggggtagcccacaagtcagacagtgaggacagagttgctgaaatggtcaggaaaccttgccacacagagaagcaaggggtagccctgcagtgcagtgccccgggcctcctgcccaagctcctgcatgtaaagtccactgcaatcagcctcctacccctgctcctgcatgcaaagcccaccatggacggacccctggcatccggggaccctttaaaccagctctacactccacacacagctactctccccactccctgcaggggacattgcagccagttctgaagcatgtgcatttccaaccagccttaattagccttgaaagaaaaccccatgggatctttagacaaagagctgaattgaattcgtaagaaagagctgcgaggcgcaatggctcgcacctgtaatcccagcactttgggaggccaagtcgggtggatcacgagtcaggagattgagaccatcctggctaacatggtgaaaccctgtctctactaaaaatacaaaaattagccaggcatggtgatgggcgcctgtaatcccagctactcaggaggctgaggcaggagaatcgcttgaacccgggaggcggaggttgcagtgagccgatattgcaccactgcactccagcctgggtgacagagcgagactccgtctcaaaataaaaaataaaaaaagagaaagctagatcatatcttgggataaatgttaataacaaatatcaggaataacatttgtcctttatgtaccttttttccagtggacacagtgggattttttttttttttttaagagattggggtctgtatgtttcccaggctggtcttgaactcctggcctcaagtgatcctcccacctcagcctcccaaagtgctgggattatgggtgtgaactactgcatttggcctagaactttttaaagttgagtttgttataactcaagaaagtcagtgctgtcgcctgccatatttgtggtaaactgagcaagtatgaaaccgccttagcagactgcagcctcctgcacaccatctttccaagttatatgtttacgcctgtgtcagggacagggctcccagggccaacttgtttgtgagttttgtcttcccgaggctgtgggtcagctcggcctgggcttccttctgctttgcttttggagatggtaagttctcctgccagcccgggcaccgtccctccccaagttctgtggtgggcgtgtcaggagcaggctccagacgcactccagagtgcctgtctgctgtgttgacaccctgtcatgccccctgcctcttcgctccttcttgctgctgggaatcctgaactcttgagggcaggcacatcattcatcacccccaggccctgcccaggtcccatccccactgccccttgccaggtctcctgcaagtaagtaaactaccacaggggccatgcgtctgtcaccattcttggtgtctgcattcagacattcactggagctctctgcaaaggctttccacctgcctcacgagaaagtcatctgtggcttttccttccttctgccgcctcctcctccttctcccggctggatcgaggagtttgtcccaggctggtccaagcacagcatgtgcacctggaggccagctggaaagatctggggcctgggactcagctttagggcctcaccttgctccggctggcccctgttccctgccccactcatggctccatcacacacctgcccttcgagctcacgtattgccttgagcttttggacccgacaagtggccactgaattccactcccctcatgtgaccttatgagtaccccaggttcttcccactcctgattcctaggtcccttccacaacactggccactcggctggggccccagctgggaccacgtgcgtaagaccctgcagaccaggagctttttgaggacagaagtgtgggttttcatctttgtatcatccccacaccgcacctggcacattggagggagttaatagctgttgatggacttgaatcgaattggaactcggttaaatatttgaatggtgtcttgcagtgctctgccagctgtggtaaaggggtgtggaaacggaccgtggcgtgcaccaactcacaagggaaatgcgacgcatccacgaggccgagagccgaggaggcctgcgaggactactcaggctgctacgagtggaaaactggggactggtctacggtgagagcagcctgctggcatttctctccgtgccgcagtgcagggggctcgagggtcgggaactcagctcttgtgacgggtcccaattctacgcggcagtcccagcgtaactaggcaaattcattttccttccacccgctgcaactacccaagaccccgtgtgcttcctcccctgcttctcccacaggctgcaccagcactgccccttggggctcactgggagaaccccactgcttcacgtgcatgcagaaggaacccgaaacgcagcccaaggcaggacgcgggtgccctggatgccaggcttgccatgctgtgcggtgtgctggcaggccccagcctcctgccatggggacacttggggcaaacatcacttccattcactcccgggacccctgggcaagggcctggagatgcagggacagacagggcagggggccatggggtggtagcagggaggagtatcacagaaccgccgggtcagcactcccgagagcaagggtgaataaagggccactgaatgtttctccaggtaagaaaatgctttgttgtttaactcctcttttattcattcatctgatatatttgaatgattcctgttttctggggaccaaggtgagccccactgccacctgtaagaaccttctagtgggttttctagactcttctcacaaaatctgtaccactcctcctgtaagcatagaccgtgtttgtccttctgtatggtcttagcaactgaaaaactcctgcttgcttctcctgatagctcttccctcaaagattgccaactgctgacctagagccattggtttttgctcagcctgcagaatatcttaaacatgttggaattagtggctagcattttttttttaagttctgaggtacatgtgcagaaagtgcaggtttgttacacaggtatacatgtgtcatggtggtttgctgcgcccatcaacccatcatctaggttttaagccccagatgcattaggtatttgtcctaatgtactgcttcccctagccccccaccctacgacagtccctggtgtgtgatgttcccctccctgtgtccatatgttctcattgctcacctcccacttatgagtaagaacatgcagtgtttgattttctgttcctgtgttagtttgctgagaatgatggtttccagcttcatccatgtccctgcaaaggacatgaactcatccttttttgtggctgcatagtattccgtggtatatatgtgccacattttctttatccagtctatcattgatggatatttgggttggttccaagtctttgctattgtcaacagtgccgcagtaaacgtatgtgtgcatgtgtctttatagtggaatggtttataatcctttgggtatatattcagtaaagggattgctgggtcaaatggtatttctggttctagatccttgaggaatcgccacactgtctttcacaatggttgaactaatttacattccccatgaacagtgtaaaagcattcctatttttccacatcctctccagcatctgttgtttcctgactttttaatgatcaccattctaactggcgtgagatggtatctcattgtggttttgatttgcatttctctaatgaccagtgatgatgagctttttttcatatgtttattggctgcataaatgtcttcttttgagaagtgtctgttcatatccttcacccactttttgatggggttgtttggttttttcttgtaaatttgtttaagttctttgtagattctggatattagcctttggtcagatggatagattgcaaaattttttcccattctgtaggttgcctgttcactctgatgctagtttcttttgctgtgcagaagctctttagtttaattagatcccatttgtcagttctggcttttgctgccattgcttttggtgttttagtcacaaagtctttgaccatgcctatgtcctgagtggtattgcctaggttttcttctagggttttcatggttttaggtcttaggtttaagtctttaatccatcttgagttaatttttgtacaaggtgtaaggaaagggtccagtttcagttttctacacatggctagccagttttcccaacaccgggtattaaatagggaatcctttccccattgcttgtttttgtcagggttgtcaaagatcagatggttgtagatgtgtggcattatttctgaaatttcatttgaaaatttaggttttggcttcgctatgaaaatgtggcaacatggctcaggcaggtaattttgcttctgcctgtgctttacggaaggaaaaatgggttttccattggaaggcaaaatttatcagaatctgatccctgcagaaatgctaccaccttcccatcagcccaagtcagaacacaaagttccccaaaccctttgagtaaaaaaaaaaaaaaagccaaatttcccaattcccagtttgcctggtagtgctaaggtaccctattattctggattaacagtgaatttgagaaggacctaaaacacctccttcctatttactccctggtcaaaacatctgaccaaggcaatagaactgaggctgtcagtccagtttccccaaaaccaaacagggacgtcacacagttacttggatgttaataaagcttagtatggagctgccaggatgtatctttcactggcagagaaacttaacttcagagctcccacaaaagatatgtgtgctttggctgggcgtggtggctcacacctgtagtcccagcactttgggaggccaaggcaggattgcttgagcccagaagttccagaccagcctgggaaacatagggataccctgtctctacaaaaaaaaatcaaaaaaatagctgggcgtggtggcacatgcccatagtcttagctccttaggaggctgaggcgggaggatcacttgagccagggaagtcgaagctacagtgagccattattgcaccactgcactccagctcagtcaagagagcgaaaagaaagatgcacttcgaaccatgagaacttgaactcacacaatagagacattaaggggctgatttacagctctgactctctacttgtgtgccttaacctctctttatctctgaaatgggaatcataaacactgaccctgcctgtttctcagagatgcttagaggtttcaagatgctaatatatatgtctaagtacttggacaactaaacccatttcatttcattgcccaaaatccaccacccaatgttcacacggttctggggcacagtccccagggttataacccattctgatctgacctcaccttgtcttatcagtagggcttctggccttttatagacaacactgagaaattctctgtccaagcacatccagacctagcttgaaaacggtcactgatcctagcccaaagactgtaggtgagctaccaacagaccaggttctgatccataagtaacacactggcagatgttcgggatcatctgaagaactgatgattacctcatgcctgcatggttacggagagtccagaaggtgtagaaggggaagctgcccagcacagtaacaggcagggtagcattgtttggacactgagtgttcagatgtgaactggaataaagctgtcattgtcatcagggaattggaagggtcctagcggtcacgccctaaatgcagcctgtactattgttggcgcctgtgcccacaggggtccggggcaggagtggaggcaagaagtggtcagttctaggcttgggccacatctgcccatctggggtcggggcacctagcactgctttcctttttgtggggtacccctgtgcgtcatgtcactggtcccctccagccaaggttgtcacccctgctgcacagaagagggaacagaggctcagagcagttccgtgactcgcccacaccccccggcagagtccaagctcctggacccagttcagtgctcaggctacttggtggaaaccaagcaagaagggattgggtaggagagctaaggggcgtcctgtagatggtctttgggctccaaggcctggctgtcctcagcatcaccattcctgttctgaggactcgctggacacttttgcttttgtacataccttgaccttcctggtacaaggagctgcaaaacaaccaaaacatgaatgggaataacatgtgggacactcagcagccctgcccaagacctggtgctcatgcatcacgtggctcactcagcccatgagccttccctcctctgctgtttggggtccctccctggccaaggacactgtgcaggtttccccagacaggaccttcagccttccgggaatgcctgtcaggtaagatggagccttttgcctggccgtcctctcttcaccagccatgctgtgaagaacacttccaggctttcagaagagtgaggtattggagtcactgtgcccacttttgccacagcccgtttgacaagctgtccctgcagtaagaacaaaagggatttgtgggatgtgagggcctctgtgacatcttggttgctatattaatctactttgcattgctgtgaaggaatgcctgagactggatcattgataaagaggtttatttggctcatggttctgcagactgtataggaagcaccatgctggcatctgcttctggggaggcctcaggaggcttttacttgcagtagaaggtggagctggcatgtcatatggtgaaagagggagagagagggcagaggccccagacttttttaaacaaccagctcttggtgaactaacagagcaagaacccactcatgaccgtgggaaggacatcaaggcattcctgagggactcgtgcccgtgacccagacacctcccaccaggccccacctccaacgttgggggacacatttcggcatgagatttggtgggacaaacacccaaactgtatcagccactgtctggagctggcatcagatggcatcccattgtgtgcaccgagctgttatggagaggtcttagcaagggcccccagccagagcctgagcctgaggctgagctgggggaaggttggttttaccaagcagagagggcctgcagggacattaaactggagttggcaccatgtgtgtgtatggtgtaccaggagcatgccagtgggggctgcatagacatgaaccaagagaccccgaccccaactgtggacctcaccacccaccctcctgctgccatcacccaggagagttgggggctgggcacctccccaccaccaccacctgcccctcactaccctctccccagatagagaaacttgcccgttttccctctctgccttctctggagaagtgggaagaatacatttccctagggtggtggtggggaccccatgtccttactccctggagaccagacctctctaattagattccatgggatgaggcttcccgagcgtttttgtctgattcggactgtttacgtttgccgtatggtttatgtgtcatctttgctgtccagcttgcagatggtgccatggttgcacccatgggttccactgcctttttaaaccagtcacccagggcttccttcctgtaaccagccaccaaacctcatcatgtgctggcatttgaaggcagcagacaaagtgcccaaaaggaaagcagagagaaggctgaacactatccgtgtatcactgtagttgtggaaggttgttaatgtaaccagttgtccagtttcgaggtcttgggaggcaaacaccgcagcagcagcagcagcagcagcatgctaagcaggtgttccgctcactgtgttgcagtagagggagcttaaaggggcaatcttccagcagatggaagcttcgatatccccatccaagcagtctcctctcacttcaccccaaggtgctgttgagaaagatgagactgtttccaaggaggtgaggaatgggccagtccaagagcatgctgcaggtgctagctgggggaggacgcccaggcatggctgagcactcctgccactcagagccttggggaggtgggcaggcccctagggaagatggagcccctctctccctgcccctagccctcatcctgaccttggccagcagccaaaccctaaccagggtcgtgtatgagggacacacatcacgttcccatctctgcctagggcactcctatcactctggtatgtttgaaaaatgacctgcagctgccttcccacccgggatagtagctctttccagaaaacaatgctgatcgttgttttcacccactgaatgccgggtctatgtattccactctgggggtggcgggcccttaaaattggggaggaggaaatctcctttctttctagatagcatgatttctgagcattaatcaccactgaaatgatgggatgtttccaatgaaaaacacattctggagggattataatggatgatgtttttaaagaaaaccatgacttaacagaccaagggaagagaacagtgttcccttatactgaaaagaagaaagtgatcgttgaccccctggtgccagtggaaggggctgatctgacttgcaaggcctctgagcaccctgacagcccaagccagccttctttctgtgtgtgatgtggagatagcagtgcctcagaggcctttcgaatcaaatgatgcaatacatgttcaaggatctgtgtgctctgagccctaggaggaagtcagggagaatcagtctgaggtcaagttcatgtgtattttgctatgtctgtgtgctccccagaaacccagctgttagatgcctttctgtgttctaggcaaggagatacaggcttgagttccatgaccttaacaatgaacgaaccttgtatcacgcgagagggtagttacagacagttttcaatgtggacacaccatctctgaggcctgcacttgctttggtggggcctgaacccccctgccccaccctgcaaggcctgcctgcctggctgtggcccccacttgctgtgggcatgtggccaagccacttcagttcagccggcatttctggagttactgttctatgccagaccctgtgctggtggtacaagagtggacagtgacttggcctaaagggagacagacaaggagctggctatagtggcccatgctgagtcccactgggcaggtatgaagtcagcactgtgggatccagacagcccctgcctggggagccacagctgggggtgggtgcaggtagagggtaagactacttttattgggatcagtgatattggcccgtgacatttgccgttgctttagaatttacaaagcacgttccctcagggtatctcattggaccctcacccatctgtccccattttacagatgagcaagctgaggttcagagtggtgatatggctttcttcacagtcatacaactagaaaatggcagagctggtaatccaccttggcttcaagtgcaagatcatgtcagaggcttagattccgaatttgaaacaagaaggagctgagctctaagatgctcatgtggtcgttattaagtcaagtatctgtctgctctctccccagcccatgacgtccatcacaatctgctcccccaaaggctttgagtcagtcgtttacactttagtgtaaatctcttatctctctaggagatcctgcatgtttagcctccccttaattgtgaaagtaaaagttgagtccttattgaagaatatttgaccatcaaaaatcaagtgcacaaggcactggggaccctggggcccttttctgggacacatgaaactgtgccatggcagcagccagcactctgcatccagatcaagagaggcagatcctccattcaccatcactcccaggaatgtgagcagcccgtgaaaggcagtgaccaaaattcagtgcttttctgggcaggggcaaaaaggagcggggacagacacttctttggtgtggaacactgtgtgtgagtccacagagcccgccgctgggccatccgtgctttacagagagaagtccgagacctgggccatgctcacatgagagcagtgagcttgctgaagagcagcgaggtcccaggaaattgccaggaggggtggccgcggggaagtgaggcgggccgcagggccatgccgaatggtccaaaggccagtgcctccatctcctgggtcccctgccgtccctccatttgctcagtgtcccttgtcaaaccagccgcctttgcagggagtgagagatcagagagcggggaagcctggtcatcccatgccccgtctccaccacagtctaggttctaatcactgcctgcatgtggctggtaagtcagaagacatcatccctaaggagtgcttttttgtcattgacctcagagcagggcaggtggttaagacaacacaggttcacaacccagccctactgctgtccccatctcaccttgtgtgggcatcatccgccatcagatgagtttaggggtagccctcatagggctgattgaggagtgaatggcatccaagcatagcattcaccccagtgctggcacaggggaaatgcccagtaggggcttttgatcatcgttattttcacaatcaccatctggggcagtcatcagcctcttctctcatcagaatctcatttcttatatgggcctgtaaagtgttcacgtgttcgaagaacagtccctcgagtgtgcttcagtccccataaatggtgcgttccgtggttgggtacccacacgtgatggcggcatggcgtggggcagctgtctcactgcagcttttgcagtggatggtgggaagcaaagttacccacagggaacagctccagccccaggaaagaggatgagagctgcccgcagtctcctctgcgcttcagtccccaagagctctggaggcgacccggcccctgcaggccatcgggggtcacctcagcctcctggttccctggctagaaggtcccagccacaatatgcaggtcagcaggccgcgaattcagaggaaggagggacccctgaagctgagactgccgggaagaaagcaggcgtcgcagggggcgtgggagggggtgtctgggaagcatttcctgtttcccagcgacggcacagggagtgggtgttttcactgttgtctaacactctgctgtttcaggtttcaaccgcttccgaggttttcctcgctcatgccaagtctcggggagaaacctgctcaaaatgcttttgaagagctttgacatttcaccagccaagcaccttttcagtagaaactgcagttactgtcaggattccgtcagtctctttctttgctatccaaaaccagcctgaggcaggctggcccctcagagactcactcagtggggacgggggtggattcattgtgctttgagagttcagccttgcatgatttcaccccatcttgggcttgtgctcaccccagacccagtgcggggagacagtggggggcagccctgcctgggccactctgcaggaagcagagcccaggcgtgtatagttgacattcctggagtgttttcctcttcctgagagctttacagcctcctctcgctaattctcaaaacatcctgttgggatctggtgttatttacagttgtgattttacagctgggagaagctaggggaagggaatcccgctgtggggaaggatgtcatcagggtaggggtgatggagacctggttcctcccctgttgggggtggtacgggcaggtggggggcaggggcaggctagctgtgtggcttgggaagacttacatggacgctctgaaacctcacattctgcctctctgaaaggtggcgccgcatccccagcagacaccacttattgagcacctactgtgttctgagctctggccacggcagctgtcagtgtgaggattaacaagctcgtacgtaagcccggtcccccgtacacagcagacaggcaggtggtgggccctgctgcgacggtgactgccgttactgttattattaaagaagctagtaacgcttgcacaatgtctcagtatcacgctggtctggggaacctaacaccttttctctttttgccggaaactctacctaaaggaaaatctcttttacacagtaacttcatgaaataatttgcacacaaaaaaagcacatgagtaaatccaaattgaacctctttttgccctttgtgcatcaacaattttgttcctgttttttccagtgacaccccctccctgcctgggaagggtggtggacagatgcagaggctgcctctccaccgggcagccagctccgacgcacagctgtgggcacctgctggggagggggctccactcacttcaggtttcccggcaaggagcttttcagctaaatttattgctgcccccatttctctcagttacctgcatcttgggaagccacatgaaattggatgtgatgagccccttgacaaaaggaccaaacaagaccagatatgttttttatagatctgtttgcttggatgattaaagcctgaaaaatggcttcacagcaatgcttggggcaaattcgatgctatcaggagacactacagtctcctcactgttcaattaacgttgaagccttaggggaggccgacagagaaggaattcaccccgtgcgcccaccatggcccagctcaggttacgagggtgtcgttcaacagcagccccttcagacctgtctggaatcatgtttgtcttcagggccaaaacagcctctaattgtgctccctgaggtctggctgcctgatcaactcagggagccaggcagacagggctgtgtgcacctgcctgtggagggcctggtgaccgaagggcagcccaaggagtgctaagggagtgggccaggtgacgcagtgtgccttgctgggctgcaggagctccctgcccagctcgctgtggcgcttggccgtgcattcactgttgagaataataacagcaggatttgtggagctccactctatctgagacccccggctaggctcctattccacactgcctctactgcaggaaacaattctacaaacaagagtttgttatcctcatgctgcaaataaactgaggctcagagaggttaagtcatttgcctgaggtcacacagctagtaagtggggacgtagcatgccaacaggcaccccttccccctgccgcctgacaccccgcactgcatggcctctccatcaaaactctgctttaggagagtatattacctgtggattttaggccagggcaggcctggcagcacctcagctcaaatgaaaatgcagctggttaggatggtgggccaccagcaggttacaccagactcattggcagaattctccagttttatttttaattatataagtagctcttactatagaacacactaaaaggaaaattagtcccagaaaccatatgatgacatggtaaatttttataacggtttgtcttccaaactgttacataggtatacacacatctatattaaacaaaaacggggtggtttctgtacatgccactttgtaacttgtcttctcacctaacacatggaagcatcctctagggggctggcccagacacagctccaggcagttaagcaaacaccccaaaattctcaaaaattctcccaggtgagtcagagccactcatagcccacagctgtgtgaacagtgcccactaggactccagctagaattaagcaaaccctaattctgatgagagtaaaatgcctacaaggggcagagcccttgggaccacctgccctcagaactgcctcacacctggccctgcctcatgggggcactagtgaacagtgagaacagacacctgtccctgttgaaggactttggagacacccttccatgatctcatggagcagttctatttatagactggaaaattaaaagccagtgacccatgctaggaaagataatgagtaaatggtggagatgggcagtgacctggttctttgattcccgcttccgattaaagctccattcagtacaacctcttattcacataggagggtggaattcattccatgagatggggtccctggaccactcgccactcctacctctgcaactttgagcaagacgtggacccgtgccaacctcagtggccggcatcagccctgaggattgttgtggaacgttccgtgctgccgtggaggcctacgaggggtccactgggaagagcaggcataccatctgcatatgctggagacgtgccacatgtcagccttttcccctcggccccagagcaggctgcacaagactaagacctttcagaggggacacgtctgcaaggtcacctcaaatgcctgagttttacgatggtcattgatcatttccaggcagaaaccttgccaatgctgcacttggttttaatagacgcacagggtgaagcccttgcccttgtgtgattttcacatacatatcagcaacactcgcagaagaaacggaagcccttcctggcactcctgcagggctgagccccttaacagcagtgattcagtgggactgactccccagctggcagggcacggacacctcttcaggagatgcaggggagtgaggcgggttcctccatccatctgtgcagtttcctccccagaaatccaacagccccctgccccatgctcctctctccagaaaggaataggaggctgcctgcctttccctcctgggtacatgttttgcagtagaggcggcactgtggccaatggcccgagaaaagatctgaagagaaaagggatgttggtgttgcctgcaggtcggcaggcagcaggtgtatctctctgtttttagtttttacttttttgaaacagagtcttgctctatcacccaagctggagtgcagtggtgcaatctcagctaactgcaacctctgcctcctgggttgaagtgattctcctgtctcagcctcccaagtagctgggattacaggtgctcaccaccatgcccagctaatttttatatttttagtagagacagcgttttgccatgtgggccaggctggtctcgaacttctggcctcaggtgacctgcccactgcagcctcccaaaatgctggggttacaggtgtgagccaccgcacccagccctctgttcttaagtgggcctcatacgtgccaaatagtcacagaaattaaccctgattatatggtaatcccgttttcccaggaagcagggtttcttttgaattacataacacatttagatataaaagtctctagtgatgtaagtggactcatcaaatgcctgccattaagtaacttattgatgtagttatacattcatatttaaagttatgcattataaacattcaaatttagaaatgttgctattttccttggtatgttataaaatggagccttatgaaatggatgctttgaggtcaaaacagttgaatagaagcagttttgtgtggtgcaacctggtgattgtagtgttggtctcatcgtcaccagctccactttgagtcgcctgtcggtttgccagagggcacgtggttgtatctgacttcactcaaatgctgcccttttttcagtctgtcccgctcccagtggaccactcgcgtggttttgcaggggattggcgtgacttcgctctgcgtttagcgttcggctccgtggctttgttccgcattgggaacgttggcttttcccttcatctaccacatttgtgtggactctcagtttctgggtacaactacttaccagattgcttttgtaagtgattttttttttttttgagatggagtcttgctctgttgcccaggctggagtgcagtggcacgatcgcagctcaccacaacctccacctcctgggttcaagccattttcctgcctcagcctcccgagtagctaggattacaggtgcacgccaccacgcctggctaatttttgtatttttagtagagacaaggtttcactatgttggccaggctggtctcaaactcctcacctcgtgatccgcctgcctcagcctcccaatgtgctgggattacaggcgtgagccaccgcacctggcctctaaaaagaattttgactgaaagcctttgctcccttacctttaggcacacctgtcatctggctatagactgcagtcagggctgcgcctggatgttgttcttgcttaattatacatatttgtgtgtgcagagacacaactactccttaacaggaagaaaagagagctctttgcattctccacagggacctgagaggaggttcaggttaagtcggaggccctcggttctgaatgcccactgcaagcacttggagagctttataaacactgagctctgggtcttgggaccccctccaccatcggattgtattggtgtgggatttttcaaagctcaccaggtagctgcatgcagtagatcccagtgtgcagccagcttcctccaaggtgcccccaacaccagcagggcgggagtcgcgttgctgtagcacctgtcttgtgttcaaggcgggaacttccttgtgtgacttcatccctcaacctcagcactcctcaaacttccatgcgcctgatgccgactcctgaggtctgggatggagccctgaaatctgcatgtgtaatgcatgaatttgaaaggccatgagctgcctccgaagggtttatctaagaaaaggaacaaggcatgaagtggggaggccctagggttggcctggcctctcgggtcagagcccgggttccagtttgaacgtgccgggggcccactagggagctgcttatagttttcacacctcctttgtgagctgaaaaaagcagtgcccctttagagcaacattccctctgaatgtttatcactctaaagtgaaaaaagacacacaaaacctgaacctgcttgtcaggcaaggaagctgaggaatccacctggcttgcagaagcccccctgggagcagacagccctcccaggcacagatgggacaccaccgcctcccacgcagcctgtgtctggagactccgcatgacccccaggaaggtcctttctccagcaaggccagggtcaggaccaagagtgaggacacgggaagcacaggatctgcggggcacctgcctccctcaccacgtgtggcattcagagaacaaggctgcgcccaaaccctccacgccctgctcccctctctccaccccaggtgccattcctagctccagctcggctgctgtaccggttttgctgactgctctcagaaccctgtaaatcaggggttgtgtgggctctggtggacaccaaagtatactcatggacctggctgtcttcctgggaagaggccaatgtaagggagaagagaccattccaagggctcctgggagaaagcaggggccgaaaagctcaagagcagaatctgagtagaggactcagatacctggccagttcctacctgggaaatgctttaaggagtgtgaagagacaccaggcacggtggctcactcctgtaatcccagcactttgggaggccaaggcgggcagattgcctgaggtcaggagttcaagaccagtctggccaatatgatgaagccctgtctctactaaaaatacaaaaaaattagccagatgtggtggcaggtgcctataatcccagctactcagaaggctgaggcaggggaatcacttcaaccagggaggtggaggttgcacagtgagccgagattgcgccactgcactccagcctgggtgataaagcgagactccatctcaaaaaaaaaaaaaaaaaaaaaaaaaaaattatatatatatatatatatatatatatatatatatatatatatatatatatgaagaggagggacggagaacagaaccacgaagtcttaaccgggtccactccttgggaatttgggggcctctgctcaactatgttgaccaggttttagcaaacacggcacctcctcatgctggggctggagatgccagcagccagggatgtctaaatcaacaccgtcagccacatgttagtgcgtgactctggtatgcaagaaaggttgtactttgttttcttttacttaattctaagccccaatcctccaggcttgtgggaaattcaaccccagtcattactgggctcttctccatgcccaagactgggcaaaggccccggagcctcaggcagcagacagtgcttgggagacctctgtggtcatcaggcccggtccttcctgggggccaccaagccatgctgctcaccatctcaaaaacgtcagagcctggagcagaggcgagcggtggaatgcagctagcatgagttaatatttcagctgttgtcttaacatcttagtctcccctggctgctgtcaccaagtaccgaagcctggtggcttaaacatttattccttacagttctggaggtggaggatcagaatcaaggtgctaacaaatccagtgcctggtgaagaccctccccgatttacagaccacggtatcctctcacggtggagagccagcaagctcgggtctctttcccttctcacactattcccagcatggaggctccaccctcatgacatctaaccctactcacctcccaaagccacccacctccacggctccaacatctgcattttgcagagacacaaacatgtattccataacatcttgaaacagtcttctatcaggcagctgctgtttttgccctgaatgattgcaagtgcctgggcatgacacacagtgcccagcccaggggcagccacattgtgaggccatcgtcccagccccctgacctcgtgtaggccccactcaggctgtcctgtctccgcagtgccacattgtgaggccatcatcccagccccctgacctcgtgtaggcccccactcaggctgtcctgtctccgcagtgccacattgtgaggccatcatcccagtcccttgacctcatgtcagccccactcaggctgtcctgtctctgcagtgctcgtcgacctgcgggaagggcctgcagtcccgggtggtgcagtgcatgcacaaggtcacagggcgccacggcagcgagtgccccgccctctcgaagcctgccccctacagacagtgctaccaggaggtctgcaacgacaggatcaacgccaacaccatcacctccccccgccttggtgagtgtcttcactggccccggttcccagggggctgctgtgtctcctgcccagtaagtcctccctgacggtgaggttctttcagccagaaagccccttcttgggcctcacttgtcacataaggctgacatttgtcagttctgtagaagaggtttcagagatggattccattccttgttatggaagtggtgtttgcttactgctgtctccaacacaggcacctgagcgtctccctcacccctttgcccaacacaggagaatgttccacagacactgtaggtttcctgtgcatgaggaatgtgaagggaagtgcttctttctagaaatgaaagctccaggggcatccttcatgatgccatgaggatgcacacatggggcacaccccaggctgatgcttgagcagcagacaggcgtggttggaggggctgcagactgtgtgagtggtttggccctgggtgctcggaacctggcctcttaccagttcatgccccaggtcagtggtgatacaaggagaagaagagcacttaaagatctggctggttgtggtggctcatgcctgtaaatcccagcactttgggaggccgagatgggtggatcacctgaggtcaggagttcgagaccagcctgaccaacatggtgaaaccccttctctactaaaaatacaaaaatcagccgggcgtggtggcgtgtgcctgtagtccccacgcctcaggtgactgaggcaggagaatcgcttgaacccaggaggcagaggttgtagtgagccgagatcgtgccactgcactccagcctgggcaacagagtaagactccatctcaacaaaaaacaatgatatgatgattccttttaacagagtttctgctttgctaaatacaagtccctgagaaatattttcctacctgaggctggaaactcaccaaaatgaaggggatttctagtatctttgttccgggggaggcctttgagctggcagaagtatagttgtgtcttttcaagcaccggcctgcttgggaacttcaggacctcccttgagcagggccttctctctgtacaatcaagaccctgaaggatatttgggccacttgtatgtacttggacctcatgctttttggggtcctttgatgtccactgttccatgttgtcctgttttataaatgcctacagtaatggtacccttggccacaaaatagtaagtgccacttagctcggaagcaaggtggcctgtgccctcttccctgaagaggcagccagaccaccacactctgtcatgtggttgggtttggatgcaaaggtgcatccctgtgacagaaagtggcacccccagtgccctggcaggaggcatggcctaatcagtgcaaagggttgacgtgtgcacgagggtgagggagcccagacggtcagaccacaagccctccctgtgcctgcatcaggacatgcctaggccatccctgaccctgggtattctctctcctatccccttagctgctctgacctacaaatgcacacgagaccagtggacggtatattgccgggtcatccgagaaaagaacctctgccaggacatgcggtggtaccagcgctgctgccagacctgcagggacttctatgcaaacaagatgcgccagccaccgccgaactcgtgacacgcagtcccaagggtcgctcaaagctcagactcaggtctgaaacccacccacccgcaagcctaccagccttgtggccacgcccccacccggctgccacaagaatccaactacatagaacatgagcgtggacttggcgtttgccattagtgcttccgtacttaatatattgttaacagccactggctggctttctacagtgaggagaaagtaggcatgagtcacaaagtaacttcaatttctaggatttcaggtacctcgaagggaagcacctctggcagacaaccgtcaagagagagacatcatttagtgttcttgtcttgactcgcttttgacatttgaatttccagtgcttggtatatcatggaggaaacatccccaaaacgagacatgctagaaaaggctttattctgaaagccggcgacaccatggagggaggggcaggtgttggtgagcctctgcccgtggcttctctggggagggccgggctgcttagcacacgtttctctccatctaccttcttgaccacatgagaaccaggacgttgcctccatgcccgtctctgagaacatagtctctaaatcctaggtgttgccttggaagtctcgtgcgtggagtgtaaatctatatatgccagcgaggacagcagtgccacgcagttcataccacccgcatgggaagaatgttccaagagagtctgggtttggggaagcatctaattttcagagctctgctgtccaccgtgtagggaaacagaagggcctctcttcaaggtgctgtgacataagaaacggtaattgcggtgatggggttgcttcctaaggcaaaggtaagcttgggccagcttcactggggcggatgggcacctgccccgccttccgggaacatccactctggcctgcacttcctaaagctttgtaccttagagatgctgtaccacatcccagtggctttctaccgaccgtggccatttatctgaaggtaagacgacatttgggacctctgaggacacaagcccaggcctaggatctgtagagcaaggcctgactgctctatcctggcacggagcagcctgatgtgccaggaccaggggaggaacgccatctggctggcactgctgcacacccgccgagccttcctgtagccccagactttgtggtacccattatcatcacgcctgtcatcattgacccatcttcttggtggggcaaggatgatgcatgatgaaggaaggtccttcccccctgcagcccccttacgcctggcagcagacaagcagagtggcctctttgagagcacagaggatggtagcaccctacctgcaaggaggccgggcagggaccctagatgccaggaggcctgttttgctcaccaacttggtgggcatttcatgggtgcttatgttctaggactttaccgtaaataacacctcctccctgatttcagacggaaggtctcacttggacttccatgggatcatctccctgtgcttcttgatttattggtgctgtgtttctgtgttttgttttgttacatgtcacaaccgtagagttagcttaaatcagaaagaagcctctctgccttctccaccctgtcttacgagctgtgtttttgtttttactaccctagaggcagagaagcggtagggatgtcagggaatttactcacttccacttgaatcaacgagaagtgttgagaaacttccgtgggtgctctgtggaaagaaccgagggtgtcaggatggagcggcccaccctcgccccgcggcctgcgcagactgctgtcctccccttcaggcctggccaccagcagactcccatgaattcccattttcacaaagccctcaaaattttgggggcgctgaggttcaattttcttcatccccaaatgaactgttaattcactgaaagacatttagacttttgcagccaaggagcagagccgggcaagctcactaaggaagccttagcttggtctcctgcatgggccccggggcctccagatatgcccactgtcaccctggcaagggccccacaccctcagaatgaaaaggattgattgggttattgtcagatacccccattagttcccctaaagtctgcatctgcagagctcttttagctcatctttttgttgtcggtgttgttttttgagacagagtctccctctgttgcccaggctggagtgcagtggcgcgatctcagctcattgaaagctccgcctcccgggttcaggccattcttctgcctcaccctccccagtagctgggactacaggcgcccaccaccacgcccacctacttttttgtatttttactagagacggggtttcaccatgttagccaggatggtctcgatctcctgacctcatgatccacccgcctcagccttccaaagtgctgggattacaggagtgagccaccgcgcccggccttttagcttatcttgaaatccaccagcctaccttctgttcatggcacgagcagtgatttcagtgaaaccatcataaacattcttgttccactagatgctgatcacagcagtgatgtttctgtgttaataccctgtactgtccctcgagtactgtacctttgtgcttgcacacgtgtcactaacgcacgtgttaccagagtctcacgaccctacggtgctatttttattggtgcaaaattaaaccctctcagctgaccgttgctggataggatcagaatgcaggaaaagagcctctatggcaatacgattgtccttttttcgtttcagagtcaaatgtatctattttccattcgttaacttgcattacatactgtacccatggaatttttgttttactttttggggctggttttgaaaggaaaaaaaacggaagacaaacattggacgccattatacatgaaaattatatagaaaaattaatcatttcattggaagcaagttgaatatgtgtaataaaatgtttttccataacagtttaaagctgtctgtgaagtaaaagacataagccagtccccaagggctgtctccttccccactgtggtggccacctggcttgccagggacttggctgcagggagcctgctggccacagctggagttggtgtcagaggtcactgggaaatgcagttcggggggatggctgcctctccctgagcgagtgctaacaaatctttctttcagtcctggcctcatcccgttgtggttgcaaaaccctgggtggggacctgagggtctgacagttgtgctgtgagcctgcgcatctgatgtagggcagccacctcactggcagagtggcccatgctccaagacccatgctgcagagtgcacgccctggccacgctggctggagagccatgctgaactctccagccgctacccccacccccacaaccctgccaacagccctcacagcttccctctgccagcagatgtgacggcaagtcccggccctgcacatcccccagcactgcagacaggacaggggttccacaccaccacagtgggaacaaccacagccatttggatcccatctgggcctgacatggaacacacatgtcacagcttacagggatggggagtccatctcctcctggagtcaggagaaacccctacactcacaaccttagaaccctctatgaagactaaagcaggccaggtgcagcagctcacacctgtaatcccagaactttgggaagttgacatgggaggcttgaggccaagagttgaccagcctgggcaaaatagtgagacccctgtctactaaagttagccgggtgtggtggcatactcctgtagtccctcccagctactcaggaggctgaggcaagaaggtcacccgagcccaggagttggaggctgcagtgagctgtgattgtgccactgtactccagcctggacaacacagcaagaccctatctaagaaaaaaaaaaaaaactggtgtagcacccagaaatctcactaaaaaaataatttgacagacaacacactgcccacagccccctggacactggaaaacctgtggtttgtgtaaattctcaagaaccgtcgcccacctgcctccaggaggtgttagaaccctcttgtccttcctccgttctaccctttctggcgggttggcttttaacagccctgttcatgtggaatttcttcatgagctgctgtgattcctggatggccccagtgattccggtttgttagatgaaattgacaagctgtccatcagcaagtgtcaagtaggcatctgttggggaccaagcacttcctagaaccaaagagaatgcaaaggaacagaagtcttattcaggagcccacagccccacggggcagagaaacctggagacgcgcacagctgggaatgagcccgaggaacagagctcggaagagggaaaggtcaggatgtcctctgtgggtttgttgactgaccttctggacacagattagaagggctggggttggaagcttttactgcagcaccctctctctgtaaaaggtctcagcaaaagcctttgcatttctgctcccaggtacaaacttgcctgcatgtgtgtccaccttctctgcctgacaaggaagcagtgcccagccttcctggaaagccagccctcccaccatcactgacctccccccttccccagcagcgctccacacaccacctcacctctggtcatgaactcccctggcttttgccctctgctctgcagtaacactcttcttgacaggtcaccaatgacttcatggcatcaggttgcgtggacatcctagtgtcctgttccccagctcccagcagccctcccctttgacacagcccctctgcagcaccacacactgctgcctttcctcgcctctccccaccatccagctagtgatggagtgccccaagctcagtcctccacccttttctatgtactttctccctaggtcatattacctggactcaagagtttttacaccatgtacattctgttatcttccaagtgaacattttgggccctgacagccatcccggcccacctctgtactcacgcatgactctccacgtgcatatactcaatcccccgggaagtttgggactaagatggcgcttcatagttgtcctaaatctgcaatttcagcagagggtttggtgagggcagctcacctctgctggggtggctcaaaggtcaagtagagactggaagggtcagaagggctatagtcttgcacctgtggccggtgatgacagctgtcagtcagaacttccgctaggaccatcagccgggacacctgcaaggggcctctccaagggatggtgggattttggtggcaaacatcccaagagtgagctgcacaacctcttgtgacaactcagaagttccacagcatcactcccaccataccctaagagcaaggcaggcacaaaggctcacctgagtttaaggggaggggacaaagagtccacctcttgctgggggtggtgtcagggttctggaagaacaactggactgggaaatactgttagggccatttttaggagattcacacacatcccctgtattagtcagggttctccagggaaatggaaccaagagaatagatgagatttattaagggaattggctcacatgatgattggaggccaagaagtcctgccacctgctctctgccagcgggagactcaggaaagctgccactgcaattcagtctcagtccaaaggccggagaacctggagttctggggccggagaagatggatggtccagctccagcagagtgcagatttacccttcgtcagccttcctgttctattcgggccctcagcagattggacagtgcccacccaccttggtggaggtggatcttctttactcagtctatggattcagacactcatgtcttccagaaatagcctcacagacacttccagaaatcatgttttaccagccaactgggcatccctttacccaggcaagttgacatataaaattaaccttcatattcacacatgcaaaatacactcacccctcccccaccccagccctaaagtctcatctcctttcagcatcaggctcgggactgcatcccctgaatcaggtgccgatgtggctcctccagcatggttccccaggcacgggcccttgagcactggttctaaaattccgtgaactaaagagacacatcctctcccctccacccagaggctcaagagaagatggtggcaacggcataagacaaccactgcagacactccctattttaaaaggagggacagagaaggcacgtgacaggcaccatccagcagctgacgtccagtctggcacatggtgccaattccattaggctcagtcctactgccagggaacgattctccttggactgcctccagaagccaaagaggcttttggcatattgtgattcattcttaatgataggggaggcatgattcaataaagtgtccttccttttggagagcatgttctgacacgcccccagctacttggactcctatgaacttcactgataaaatgagcccttgggctgggcacggtggctcatgcctgtaatcccagcacattgggaggccaaggcgggcggataatgaggtcaggagatcaagagatcaagaccatcctggccaacatggtgaaaccccatctctactaaaaatacaaaaattagctgggtgtagtggcatgcgcctgtagtcccagctacttgggaggctgaggcagaagaactgcttgaatccgggatgcggaggttgcagtgagccgagatggtgccactgcactccagcctgggggagagaacgcgactccgtctcaaaaaaaaaaaaagaggggggtgccctcaaattttcatagggcttttctcccccagcctagagtccatgtgtcctcccacagcctctagtctacttaccactcctgtgcatctggtctgattaacatgatgtcacagatacagtggatcagtccaagttcttgggagagtctttacaatccaggccctctcaggcagtatcataacagagaattaacatcagcctcggggaggacaagtggaaacttgtgtctgtcacacttctttggccccactcctcctttctgatatggatggaaatgaatgccttccccagccactggccatcatccttgcatctgaatcacgttaatttgctctagcaaagacatcacacctggcacagcagtttgtgtggggctcattcttggatacaattgcagtagtccactgtggtcagagaggatccactgtgaatttcgtagatgccagactgaggaattgcatgggaatatgatggggacaaccacagcagcatcctttaggtctttaagaatgacattcataatgctattctcactgggttgcaacattgctattgatttactgtcttgcctggtgtcatgagtggtgcaagattagagataaccaggtccacaaacatttgtatctttctacaatgtcagacttttattgatgccatttcaatcacagaagcccaaagttcgatggggttcccaagtatgcagttctccttagtactacccattcacttggtagtcagagccatgggcaccaggctcaagcccctccacgggtcagtcaatattgcaaaccacgcataatagtatacatagtcactcacgcctataatcccagcactttgggaggccaaggcaggtggatcacctgaggttaggaattcaagaccagcctggccaacatggtgaaaccctgtctctgctaaaaatacaaaacttagccaggcatggtggcaggtgcctgtagtcccagctactcaggaggtcgaggcaggagaatcgcttgaacctgggaggtgaaggttgcagtgagccgagatcacgccactgcactccagcctgggtgccaaagctagactcagtctcaataataatatacatagtcactatataaatgttacagattaaacattccacagtaaacaaagtaacatttaacatcaagagaaaaagattgaaagaattaatcaaccaggccaggggaagtaagacaaaatgagtcctggactgggttggccagtccatcggtcttgcaaggaagagcctttgatatagcagagcctttggaggcagatgtgaagttcttatcataagtgactgcaagaccatgtcaattaagatggccagttgaagctgctgaagggctggctgttcttttatggtcacagagtcctctggtgagaactgatagtactaaatagaagagtatgcttatttgtgaccttatctggttggatgctgtcttaatttttttatttgtttcctaagcaaaacatctcatccttgttggcaaagtgccctatgaaatatacaattgagggaggccgaggcgggtggatcacgaggtcaggagttcgagaccaacctggtcaacatagtgaaaccccatctctactaaagatacaaaaaaattacccgggcatggcggcacgtgcctgtaatcccagctacttaggaagctgaggcaggagaatagcttgaacctgggaggtggaggttgcagtgagccgagatcacgccactgcactccagcctgggacagagtgagactccatctcaagaaaagaaaaaagaaatatataatgcagtccttttctaagatggagttagttatgtcaagggtgctatatacacccggggagagggaggtagtttcacagacttccacttggccctccccattacagtagttttttaccctacaggccaaggaccaagtccagccattaccagtacacatttagggagggggaaaccatcactgcgaggcttcacggacccaccagacccactgtgaaccaaacctggaccaggccccatttattatgtgaactccattcctcgtcactctgaaacggggaccacaatgacactcagtagccggggtaccagtgtcaacttggatcctgtgtgcaagtcctctaaatgcctgcgtatctttctctccaacaagtcaatggctgtaggttcctttggggaaagattgggggcaattaattgatacccttctccctgggacccaacctctccttcagtcaatggattctgggcatgaaaaccggctcagactggaaactgagcaagacgccatgtttgacaggatggttgctcttgtgatcgcccttttttagtcaatgtgtaaactgagtaatactataaatgtacaatgaattgagttataggtgggaagttggctgctcctctgtctggccctagtagggctctattaactatttccaacccctgtctgtaggtcaggccccctgctgcttctctgaccttgctgcccctcatgatcttacgcccaccctttttctgactgtgaagggcttaccatgtggctttattttgtgatcctattagcctcatggctatcagggagcccagttctgcacagcatcccctgctgtcagccatgacctacagggaaccgttctgctggaacttctccacaatgctgctgccctttcagcaggacctcctcactgctttgggaaatggaggagtttccctcagaccctcctatggaacatcggatgggggctgggaaggtgttccagccttagaaagaatatcctctctagcaggcccagcctctgactcttctgaaccctctatctctacctaccaaaacacttctttttttttttgagactgagtctcactctgtcacccaggctggagtgcagtggtgcaatctcagctcactgtaacctctatttcctgggttcaagcgattctcctgcctcagcctcctgagaacctgggattacaggcgcccaccaccacgcctagttaatttttgtatttttagtagagatggggtttcgccatgttggccaggctggtcttgacctcctgacctcaggtgatccacctacctcagcctcccaaagtgctgggattacaggtgtgagccaccatgcccggcccctaccataacacttctactgcactttgcgagaccatcactgtccccaaggttctgtgagccatctgtctcccagggtccttgggagggagttaaatccatgcagagaactcccgctgcaagaggtagaattcccccttctaccttcatgtccactgttccttatccagcacttcagatccggtctggtacactctcctggcatctgcatgtccgttcttgctagggcctgcagctccttcgggatctagttcctttccccctccacctgagttacattgtgacttaggaatctgtctggtggccaggaggggaggtgggggagatcctgattctaacacagcatttgtattatcttacaaggcacaggactcggtatcatctttaagcaagggagcagtgatagatagctttaatagggaagagagggccacttccgcaggctggaaagcgtctagagaatgtggggtttcacagtttttaggacatttactgagttatccccccttccaatcccagaatcccactccttcgtaatcaggattctgacctgcatgtagccaacttcctggggttgaggattcagccttctctgaagcttctgtagtcattaccattgaagcctggcctgatcctcaacgctttctgccctcttaagacataagggcctcgtttcacacttccccttaaattagtgattaatcatctgtagcatttttattgtctttctccaatgcatcactaacactggcaacagccacttcatttctttgccttggaatttctgtttccctgtatctttcaaatgactgagctattgcgccatcagtgaaggcttaatcattgcccatacagatgccagaggcttccctcctgggaggttggtgagggggggggggggtgcgggggagcccttgtatccagctggcaggtgatggcagctccaaaatcctattttagggtctgcttcctataggaccactcctggcaccagctgccttagtttgggttctcaagagccagtctgagatggaggcttgtggggaggttgattgggaggtaccctcgggaatcctgtgatgaggaagaaaggatttggcacaggcaggtaccatggggagctgtagagtggaacggttgtctcaaacagaggcaaggtggcaggccttcgtgtatcacaggacgaatgccatcttgagggttcactgtcttctgctgagagggtactggggacagactcagttgtgagcagccaccactcctggcagctggggacagccctcagtcctgaagggggatctgtgtggcataccacaccatacaccacatgccttaaacttagattgttacaaattaaatgcccaattaactgcggcttccccaaatcagtaaatggcaccactaaccaactaatgtctgatatcaaaacatcaaagtcacctttctttcctcagtttcccttcctgtcctcaacccaattcagccacagataccattggttctacctccaaaggatatctctaatctgcccacttctccctatcttcactgccacgcggtggctgtgcgccaagtcgcagacatttcaccaggaccccacagtagcttcctgtcatagtccattagggctgctataacaaacaccttagcctgggtaatttataaatagagacatactgctcccagttccagagactggaaggtcaaggtaccagaagaatcagtgtctggtgagggctcccccctacttgagagattctgccttctcactgagtccccacatggtggtagaaggggcgaacatgctctctgggttctcttagtaacgactctagtcccattcatgagagctccaccctcgtggcctgatcacctcccagaggccctacctcccaacaccactgcactgagaattaagttcgacatctgaattttgggaagacacaaacattcagactatcacacttcctgaccgtctccctccgacacactctccacaccctagccagggtaatatcggaaaaacgtaaatcataataaaaacttaagtggcattccctgcttaacatcctctgatagcttctcacccctgtggtcctctcagacccccgttccctcctctcctaccctgtccttcccgcacaggacgcccagccagtctcccttctgtctgcgagccttctgccctcttccccaccgggcctcagcaggtgctgctccccacgtaggtaacgctgccatctcacatcccgcgggtctttcccctgctgaaatctctgcatccgccatgtttcagctcccacatgacccctcacacagctgttccaagcatccagctaacatggcctcccagtcacggttgctgtcctgaagcaccgctcggtccttgtcacaacccagaattattaacgtttttgcttgtgtagtgtcactttcccatctagaaagcaagctccccacacacagaactcatgtggcacttttgtatagctggagccctggtgcccagcatgtgcaccccctaagtgaatacacttaacctttgttagttcccattctattgcttacattatgttcagataagctaaagactgtaccaggacatgtttatactgggtaataaaaacatactctaacttttttttttttttttttttgaaacggagtcttgctctgtcacccaggctggagggcagtggcaccatattgactcactgcaacctccacctcccaggttcaagcgattctcctgcctcagcctcccaagtagctgggactataggtgcatgccaccatccctggctaatttttgtattttaagtagagacagggtttcaccatgttggccaggctggtctcgaaactcctgacctcaagtgatccacctgcctcagctttccaaagtgctgggattgcaggtgtgagccaccgcacctggccaaacatactctagtaatttttttggcttatacctcaagtgatacagacatttggacaaccagatgtacatcaataaggaaaagatgcttaccattttccaaatgctcccccttgccaacagagataggtgtgtccaggtggctgtcatggtgatagaagctgttttctcgtcttttcatttgatctgtggaataggaaagtgatgactcagaaggcagagaacattcatggtctggagaggatctttgaaaagcctgatgtggcgccaccatctggtgtctctagaataaaagttctaaccgcgcggttcatggtatcttcgggacaagcccacgcgccggctgggacccagcatgacatgggggctcgcccactctgggatttccttaaccagggaccactgtcatgcctcgtgcactgtgaacttgtcatccccgtggcttggaagccctcctcagaaagacatcccctttcagagcctgagcagccacagcatttcaggggaccacataaaaaatgaccaagaaggccagacacggtggctcacacctgtaatcctagcacttcaggagaaggatggaggaagaaggatcgcttgaagccaggagttcaagaccagcctgggcaacataacaagacctcgcctctacaaaaaaataaacaattagccaggtgtagtggtatactcctgtagtcccagcttcttgggaggctgaggtgggaggatcaattgcttgagcccaggaggttgaggctgcagtaagccatgatcacgccactgccctgcagcttggatgatagagaccctgtctagaaaataaaaagagaccaagaaataggaatattttcctcctagaattgctcaggagaacactgggatttcctctggaaaagactagacacttatgtctgggggaatccatcccattgtggcaaaaagaaggtaaaggacccagtgaatcagagtttgttggaagcctggtgtggtggctcacacctgtaatcccagcactttgggaggctgaggcgggcagatcacttgaggccaacacggcaaaaccctgtctcttctaaaaatacaaaaattagccaggcgtggtggtatgtgcctgtaatcccagctactcaggagaatcgctttaatctgggaggtggagtttgcagtgagcagagatggtgccactgcactccagcttgggtgacagaacaagactctgtctcaaaaacacaaaaacaaaaaaaacagagttcgttgttaaatagagcccagtagagccaaaacaaaactccttcctggcagagccatcaggataaatgtcagcccttaacaggggctgccacagaccccaccgttatccatatttacctacagcccagcactgctgtgatgaggctcagggaaaataacagggtccctgaagtctccaacaagctctttcctacccaccctgtctctgtctccaaagttttctctttccacgcacctgatcctaccctctcacttttctgcctctttctcgtgtatttgttctctcctccctccctacatccatctctccttcgctcttccctccctttccatttcctgcattatttcccaccttctccaatttaagagggttatccacttctgacttggccccatcatagatgcagaagcttccacagagggtcagctcgtagatccctggggactcgggggctgccctaagggctgtgtttctactgagcctttagaataccaagtaccctttaaaaattcacttgcaaactacccacccagtatcgttgcagactgttctttagaagttttagaggtctctgcgtgctcacttccaacttatttctgtatgtgccagtcacacgttcaacaattctttggctcacaatgtatccccagcaattggctttctcgccactgaggttagttttaacatgccagctgatagttataaaacagcaattctggaaatcccatccaaggattgctctgtattaacacatcatcaaaatagtatattgcaaagtcaacatacgattgtaactgttgacctatcaaatactgaaatattttgaaacctcagtgggagccaaatgccattttattaaattgggatacaggaaaggaagagtgttgcaaatgtcgcagtggtgttagtttgagatgttagtgggttttgccaatattttctctaacaaaataataatgtaatatatctatgtcacattagaatattgtatgtttattctatagatacctacactcacatatatacatacacacagtgcatacatgtgaagtgtggccacagagttgacgtgggacaatctactgtggttcatatctaatggccatagagcaatttcaatgaggttcctgcaacctctggagcaatggccccattactcaattaagacagaggctcccaaagcggctgcaacacccatctgaaaatgttaagttatggtatataaaaatttatatcatgactcatatattcaacaaccgttttacaatgtaagtcaataaacttctattgagcagtgtggcagatacagggtaggggtgaaggatgaatgcacacagtcccctgtcctcagagagtcataacaatatgttactgtgcccttctcttggaaatgagtgactctgcccaaatgtggaaaatatttaagtgagttcaaaactaacacggctgttggctctgaatacagaataaacaaacctctgcccaaagagaaatcagatccgctgtctttctgatctaactcagcaaagccaagttctcagagtttgaattcctcccgcataagcaccctcaaatgcacttcttgcctctgacattgcactcatcccaaatatcacttcctgatggcatgacctgtgctttctgagtgtgttgatgggtcagaccactgaggagtcctgcgtggctctctctgtccagaccaagctggctggtcaggatgaacggccatgtctatctatacaaggctggtggcttatgtgagctagacttacacagctgttttaggatgttcaaaaagatcaaagagcaggaaatcatgaaacaaaatcaagtagatagagaaaagaaccaacaagaaaaaaaaattctaattgacaagcaaagtggttacagtgaaaacctcgaagccctgggtaaatgcgagagacaaaggaatccaacacagggctcgtgaatgggaaagttacttggaagagggaagagttgtacccagaaggcagtgtagagaggcaaaggaacttttttaaaaattaaagtgtaggcagggcgcgttggctcaagcctgtaatcccagcactttgggaggatgagatgggtggatcacctgaggtcaggagttcaagaccagcctggccaatatggtgaaaccccatctctactaaaaataccaaaattagccaggcgtggtggcatgtgcctgtaatctccgctactcgggaggctgaggcaggagaatcgcttgaacccaggaggcagaggttacagtgagccaagatcacaccattgcactccagcctgggtgacagagcaagactccatctcacacacacacaaaaaaaagtagttaggcaaagagtttgagaggtgttgacttctgtctaaacgccactccagagatgagaatcaaagaaatggaagaggaaatgtattgagatcatggctggggatgtgcaagaattgaagacaagagtgacaatgcacagaagtgaatccacacctcatacatcatattgaaactacagagatcaaggaggaagaagaaatcttaaaagcaaccagagaaaagacaggcaccctggaaggaataacagtctgacagcaggtgccagagggaatggaatagtatcttaaagtgctgagagcggtcgtagccgtggctgtttagttcagctattagcattccatggaacagactgtggggagcgccacttcctccttctccagagtctcccacaattgacagcggacatttctcagaatcccggctcccgcccggggactgtgtgtctcaatgagtggctccaccttgctccgtttttacaaaagtgagaaacctgagagccagcccatagacagaacctccccaagtcctgtcactttggttttttttccttttttgtagagatgggatctcactatgctggtctcgaacttctggcctcaagggatcctcctgccttggcctccctaagtgatgggattacaggcgtgagccaccgtacccagcccatgtcctttgtcttaaattcccacatgtccatccctgtgggcactgctccggctcaggcctgttgcaggagccgcctggctcgccttgctccctaccacctcaccaataccaaagtcactcttttcagaccgctaacaggggctccctttactgcttcctactcaaagctctcccagctcacccttcaggcaatgtgctccccctgttgccccctgcccatgcctgggatccccattgttccaagccaggggtctacaaaccagggctcaccggccacactgtttggataccccctctgcccagtccctggctgtggggtcattcccagctgtgccacatgatcgctttcagcaaaagcctgcaggtaactctgggtgccacacttctgactactctgagaatcgcatccagtctgctctacccctctgtataagttgatcctttagaaaggcataggaattccaggcaaggacaaagcctctttcctgtggccttgcgtgttgttccagtccttcccggagcccttgttcttccgtgcatcccccataccacagcccacaccacccctccccacatgccttcctggtgggcaccagagcttccccttccattctccacagtctctttcatgccacaccctggtgggtgctaggcaggacataggctgggtccaggttccccctctcaagtggcatgaggcccgtgcccatccacaaaggacccccagccccaccagggatgagaatccagggctgaggtgcagagccacgtggaggccagagagctgtgctcctgggtgtgaggagatataaccatgtcttttattttctgtttcctgatgctttgacatctggggccttgccaaccctgaagggatggcccctcccaggactatttcctagagagaataaagaactcacccccacagcgtgctcctcaaatgtgagccaaccaatccagaggccacacccctggccacacccccatccttccagccacccccacctccccgcgttgccccagggcgagtaccaggcaactagagacaggcccaacaccccaaagcctgcagaaattaatcaaacaggccaatccctggcctgtctaccctgccttgcccagtccttcccatggaaccacagtagaggctcttgtccatgttttattcctgctgcctctgcctcccgcccagtcctgtgcttcctggcacgaccccccatggcacactcccttgtcttgggaactgtgagtaacaaaccatcttttcaagggcagctgcctcctgatctgttggtcctgctgttcctcacattctctcttaatgtatattttaaaacagagggtaaagaagaaagtggtcaggactcttgggaggattagagacaggaacatggggcctatttgccaggacgggtgggttctaagggaggggaacagatgggtcatgcgttacgtcaaggcaggtggtcagcagctacctcctgccctgccacgccccacctacccaccctcggcctgcccgtggactgcacttcctcctcaggttggaaaataaggcagactcttccaggctctcttctaaaggagagcacaccaataaatcaaacaccaaagtatgccttcttctcattttattctaatgcaagcatcctggagtcttctgtaccttctatccatgcaccctgccctccagccctctctctgtaaggctatgtaacacatggccttgtctgaaccaaaactgcctcccagaggctggatggaatgctggctgcagggtctgggtcctgaggcagattgatgggtgaacccatctcaaaatgagatcctgcttggctttgagtcatgaagccccctgaaagtaatccaggactgtcggccactctacagagtgggtgcagccacattccacaccaggaagaccaaagccagagaggctgtcacatctctcagagccacatagcaaagagtgattcactctgcttcatgcagtccatggagactcacagaggagaggacacctgaaggagaagtgaggatctggcaggcagaggagaggaagggctttctggacagaagggacaggctgtgcaaggggacagaggagagtgggaaatcggtggcacatgaggtgcagcattgtggggttgatagcaattgaaaccggaggtccaaagaccagcatgtttccagttttgccccccgcctccagggcccaccacagggcctcgtgcagatgaaggattcaataaagatttcctgatgaatgaatgagtttaagacacagccatggacagagacgtgggaccttgaatgccagaccaacagcattttgccttctgctcagagtgggccaactgggctccaggcagaaaaggacacctaattagaccttcttgcttctacagagatcatgccaggatagccaggggtgtttctgggctaagctggatgagctggttaagccatgctcttgaaataaatagcttgtactgtttgtcccccaaggacagaacatgcttcgtggagcctgtctcattattccttgcaacatacatatgcaaagcattagcgggcagatttcccagctctggcttgtttagagagtgaagatttttgtcaaggtcacacagcacatgaggggtgaaactgaaagcagcaatgaccctcagccccttgtcctaaccatgttcttctctgatgcttttcccccttgcttcagccaggggccaaggctgacctaccaaatcatgactcagctcctatctgcgggttaggcccaggacagggtctcctcctccaggctgggatgccggctccccacagcggagtgtaacttgcttactacggtgtggctctgtcctgcagtgattgtcacctctgggggccaggcaagattcaagcccctgaggggagaaggagatgactcatgtatgcctgaaagaaagcaggaaggaggtagaaactggaccca

SEQ ID NO: 5689 - DNA, 226054 bp, Homo sapiens
  PCSK6 gene - 99661657 - 99847710 of chr15; NCBI Entrez Gene ID: 5046; Build 35; sequence includes 20,000 bases upstream of initiation codon and 20,000 bases downstream of termination codon of the gene
ttatagggatggttttatgggaatatataaatatacatatatataatatgtcaaaacttagcaaagttttgtggggagttaaatgtggagagtaacatattagtatacatcagtgaggctgaaaaggggagtattgttgtagaaagggacatttagaaaacaaaaatgattttggaattttaaaatccaaaagcagaaaagaaaaatttagtagaaacatagaaacttgaggaaatttccaagtaataaaaatgattacaacaaagaaatggaaaatataagctaaaaagcaagaaaattagactaaacaggaaatacatcttaaataacagggctttcaaacacagagaaaaaaaatggaagggagcaattcaccaaagaaacaattcaagaaaaagttcctggatcccaaagacatcaatttctaggctgagaggttcaccaagtgctcagcacaatgaatgaaaacaaagccacacaaagcacattcacacgaagtttcgaaacattgggaacaaagagaaggtactaatgctctttgaaagaaagaacaagtcgcatacaaaggtctagaattagttctgcgttaggcatctctacggcaatggtgaacactaaataatagagcaaggccttcaacattcttattgaaaatgatttccaaattagaattctatatcctcagccaaagtagtaacgtgctcttgggctagaataaagactactgggcgttttcagaatgcaatgtctcaacttttaaaaattgttcctgcttttttttttttctcaggaaggagacttttttctgttgaggaatttggagatggatttgtgataggtacatagtgaaaccaaacaaatgggataaaggttgactccagtgaaaacgaaaaccatatcagaaaataaaggaaattagaatgcatatagctacagcctcaaatcgtatttccatgggcctaataaaataaatgctaaatatgatttgccctataattgtgccactctattagaggaatgggatggaaaagaaatatatttaagggtgtgggagtagagtagaaagctaaacccttattgtccattgcctgaagtaagcatactatatttaaaactaaaaatattaataaacaggaatttaaacctgctatttagaaatttggaggcaaatacaacaaaactaaaagcattgaaagtcatggcttccagagagtgggaggagaactgctaatatcacttgcagatttatagaactgtttaattttttaaattatataaatgtacactttattaaaattaaaagaatagagacatgatagaacaaagttttccagaaatgaagaaagataattatctctagactaaaagatgctccaagttccaagtagaataaagaacaaaagacttatgccctgacacagactcaagatattttagaacgttgaacataaagagaaattcctaaaagcttccaggaaacaagaaaagtcattctcaaaagaccaaaaataatactgacctcagacatcttgtcaggaacattgaatactaagaagaaaaaaaattctgggaaatatgatttaaaacccagaattccatacgtagaaaatcgttaagcacgtgagcaggagttttagttttacaagtactcagagaatttgcctccaaagcaccctttcctttctattactgcaaaatatagtccagcaaaaagcttcaagaaacagtatgattaagaggtttggtaattctgaggatctgacaaaaacacaagtagtgcaacttaaaatcccaagaaaaacaaaaagctatttaggagatttatgtctgtgtctaaatataaaggaaataaagatgtgacatgaatttaataattaacctttcatgtcacttatggttaatgatactggacctagagaaaaataaataaaatcctaacatactgattgactttgaaggaacaatatttacaaagtcataattatgtacacagtgtttatttttttaatatatttttagaatcaactggtggacaaaacatgaaaaccttatgtttataagacagtatataaaatgatcaactctgacagtataaaagttaaggtatggctaagagaaactgatctattatctgaaaacaatagaacaagaagtgatagataagagattgcaagttggaaaggcaaacaacagaaaactaaaaataacaatgtaactgtgaaaatttaggggaagatgtagtgtaagtcagctaaagccttgtgtttcatggcaaggcgtcaacagagcctgagttgaatatagacatagagatgtcaggatgccatgtagactgaggatgctagccactaggaacacaaaatgcagaaacgctgaaaggtggtggtctctgggactatgggtaggacaagggaatggagtggatgatttttgctttaataatatgcccttctcgaccatgcatactctgagaaacatttttaatgctttaaatgaataaactaaaatgttgaattgtgaatacatttatgttctgaaaaccagatatgaaaacatgctgatagtgaaaagcaagtctttaggcaatcaagacaggaggatattcagcatctgtcatgcatttgtcatcaggttccagaatggtggccttgccagagggtgggaacagtcccttcctcattagtacttccagccccaaaattcagccccaaaattaaagataagcttacagtggatatgaagtattagtttgatggcagtgtgcgtgtgtgtgtgtgtgttgtattagtgtgatggcagtgtgcgtgtgtgtgtgtgaagtattagtttgatggctgtgtatgtgtgtgtgtgtgcaggaaaattacaagaaaaataaagcatctgaattttgaatcaaaattgctaagttgtttttgtaaaatgtgattcagaagatctaaaaaatatcaggtataagagatgttctattattatgacctttagccatagagccaactggcaggtgtgagcctccattctgatggaattctgcagaagcctctggtcaagagaggccctggtgagctgtgctgggcttatgagagagtcgtgtgatggggcccagtttcattcaagagacttagtatcctttttctttctcttttacataaccagttcgacaccgctgggtgccaacagacagaccctctgttgagttgtccacctgctttccacctggcaggtgccaatagcctcttgttctcccagttctcccggccctacccttgcgggagaaggatactattttgtattacttcttatgaacattgtgagcaaaacgttccacggaccacccaagcagtgcagaccacaggccatgtcccagggacctggaagcagcaaggacgcaggtgcaaacacccagggtgagcctaccccatccttcacacccagggtgagcctaccccacgccttcacacccagggtgagcctaccccatccttcacacccagggtgagcctaccccatccttcacatccagggtgagcctaccccatccttcacacccagggtgagcctaccccatgccttcacacccagggtgagcctaccccatccttcacactccgagtgagcctaccccatccttcacatccagggtgagcctaccccatccttcacaccgactaccctggcagccatgttgcaagaacgatgagggcagcctggggaaccccccaaatttcagcatcagtgagtgctctgacctcactgatgacaaggtcccacaggtcacttacacgtgtcacatagaaaacgttctcctgtgaccaaaaatgcaagccatctgacaaagagtttcaggctattttcagtatcattatcttctccgccaacactgacaaatttaccatggtcgtggttttcttcgttttaatgactgtttggttgtgttttcctttggggatgggggctggtggcgctgctggcatctgtggcaaggcctcgagggaagtggatttctgcggtggtcactgtgccttgctgccttgtttaaaatgagacttcatgggacacacacagcaaagatgaaagagcagaaccgtggcatgtgagggacgattagggccaggctgggccattaaggcctggtctaaaaggtgcccagacacctattgacatgacacgtcctaactgctccccagacaccaggattaatccactgtgtcagtttgcttcgtgtccctaatgtctgtcagcaggagcctcttcgtgcctgatggagctggggaggggaggatgtcaaggtggatgctctcggctggaaaagctctccaatgatgggctgtaacgaaagtttgtgacatttcgatagctctttgccttttaatgtgcgcatctggggacagcccgttacctgcttttctgccttgatccatcatttttctctggaccaaatctcaaaataatacagcacagaaagaactctgggttcgagatggcaagtgcagcctgctctctgctaacccgacaaagtgttgatgagtcagaacttctgggtagcacacaacactgctgtgtatggctgacaaaaatgtccagcttgtaaacaattaggaaacagttcaataaaatattcatgggcaccatttaacccatgactcaggcagactccttacaatcttgacactgatagtctgaacattgtcattcttctacatgtcttcagaagggctggtaaatattgaactacagttaataggttcttggataagccagattcgcaggcccttaacctcacgccttctccctttacctccatgacatgatgtttgaacctagaagacagggttgtcgacatcttctccaccgtgcggagccctcggtgccaagagtggtgggtgtccccgtggcctcccgcctggggtctgagctgccgcacgatccatttgtcacctctgaagtgtatctcaccgtgggcactgggagcagcaaatggttgttctgttcttacctgctcgatccacacaaagctgggaaggttcatgggtgcctaatctcacaggacagacatgacgacactgtgaattcacactgggtctcatcagggatttcactgttcttccagagagagcaagtgtcttactgaccaccagaaaacatttttgggggagggggaaaataactagaaagtggaggaaaggtaaaatagaaaattcaaggacaaataagatgctaaagaaaatgatgaagtagaatgaatgagaattgcttggagggggtgcctctggcttggatggctgtccattttgctgaggtgtctggggttgaccacgggaggagggaagaaagctgagcggggaagaccaggcatacctaactaatggtgtgggtgatgtgatattcctgctagccctcatcggtcctggggcgtggctccttctcgcctttgctcttcctgtcttggagcggattgaggctgggacgagaagagagatgggccagcagaagggctcttcccccattcccccaaacccttcctgaaataccagctggcaaaacttctcgaatgtgcagtttcggaactatcacagcttccatgaatatcagatgttccatttagttcttgatctctctcccctctgtctcttttgtcacttttatttattttgttgttttaatcttcctggaggcctaatgggctgtatttgagatcagtaggatacttttaatggtttaagttgccatgattccaggccccaagagaaaatgttctgtattttttcaaccaaaacctgtgcctgccacttctttttaaaatattaaggatgcatttccctagccagtcccagcttgagcatttgaccctcctgcccacccagagttgccagatttagcaaataataatacaggacagacactcaggtaaatttgaatttcagataaataaaaaataattttatgagtgcaagtgtatcccaacttttgtgtgaggtacgcttaaaccaaaagtgttttcattgtttatctgaaattcaaatttaactgggcatctagtatttatttggcaatcataccagctgattcctcaaccattctttggaaacatttaatcccaagttcttacacagcagacacatttaatcatacttactgcctagcaagtatacatacttttttttttttttttgagacggagtcttgctctgtcacccaggctggagtgcagtggcgcgatctcagctcactgagaactgggtgagtctcactgggaactccgcctcccaggttcacgccattctcctgcctcagcctcccgagtagctgggactacaggcgcccgccaccacgcccgactaatttttttgtatttttagtagagacggggtttcactgtgttagccaggatggtctcgatctcctgacctcatgatctgcccgtctcagcctcccaaagtgctgtgattacaggcatgagccaccgtgcccggcccgtattctttgttcatgatgtctctacctggatgcatgcaggatgtctccgacagtgagcttccaaaggaagtccctctgagtggcttagagggctgtactcacagtaggggctgatggcacagatcgctttaggaaggtggtgagtgggaggtggtggtggggaaaacaagacttaccggtttaccagaggcagggatcagggtgggatcgggagggaataggatttggcgctgttttcactgaattctggaattgtggtctggctctgggaatcacctgggaggtcagcccctggaggggaaaggcagcccctcctcaacgtctgcgacaggtgccctcctacgcttcccaacccctcccagtgtgggcagttccccagctcacaggcagcacacgcaggtggaaacagctctacctgtcggctcaccctctggcgaaattctactttcagaccaggaaagctgagaggggtggagggtgcctcgctgaagtcacagtgctcgggccaggccttcccatgcctcacctttctccactggaccccgcttgttcttttcggcctgtgagaaggccacaaacagttgttactttttcaagtcaaagagggtatgcgtcctgaagacatgatcagagatgtcattaagtgtgcgcgtgtatagggcggagtgaggcccaggaggtggagtggtgcggctctcaggtcacggacatggaattcctgactctgcctgctcccggcggcctgctggcctgtcaaggggagagcacagtgagtgacaagaggatttatttccaccagccagagaatggctcataatttacagcccgctgagccagcctctaccacggcattagagccttccttttgtagacagtaataaattgtcttatccccggtgctgacataacatgctcctttttaagtgcgccataattttcatttttaagggaatattcatattggatggcagagctcatgggcatctgaatacttctctggagagaagcctttttttttcttttttaaaagaagatataattcagctcctaaatgccactagcagggataggcttgacttctaaagcgacattaggggcagaatttggggacattgtagacccttcatagacagtgacttgcccctcatcagtaggcatcaaaaggatcaagcccctgcaggatgcacgtcctttgactgtccgccttgctgcctttgcacgatggtggccagggagctggggcggcctcgggcttttccatcccaaaggacgggcttccccgccaccagggggactcactcccttgagctccccctggcaggaggggcctgggggtgacaggcagacagtaaaggagtctgaagcctgcccggggggttcccagcttgggatcatggggctgccgagtccgggcaccgtgtctctctccttctgcatcctccagggggcaacagtgcagcctgctgatccccagtgagcggttctccccggggcacagtcctggagggggatgccacagatggtccctggtcaccagggagtcctcgggcctgtctcctgtttctaccgacccgtggggatgggccagccggggtgtccttctcccctcccgtcaaggttcttgtgcctgggtccttatctgaggatgccctcacggcgtggcaggaagagatggggccgggtggctgcccaggctcctccctctgcctttgccttgtgccttcacagccacccattccagaaccctaactgttcacctgacaagacctcaggcaaagccctggctccctcggaggatcggggctttcttgtttgtaaaacaggacacggactttaggagctcagacacgaatgcatgcaaaagccttacagagggttcaggagaggtgagtttttgtctcctcctctgctccttctttcttcactgcctgtttccctcctttcaccaggcacgtaggggaaggagctgaggtccccaggctgtgcagtccttctaggtctgggctgtggagggagaggagaggctggcctgggggtctctgctgggggagatacaagtccggcctgtggggttggccagcctggggcatgtctgtgttaactcagacacacccacacagacacttccagaaccaggcatgtttacaagtagcaatgaggtattgctaaacctctggcctgatgagaacagctctcacataatgctgtctgagtgccaggcccaggtccaggcactgtacactaattcatttaaggtggacacaaatatgcccattttatgctcagctgggaaaactgaggcccagagaggtcaatggactcatctgaggtcaggcagctgggaggtggccgagctgggatgagaacccaggtggtcagggctggagcctcttccctagccacagtgcccctctgcctcttctcctcctgcctgagcaatcccacttcacttggaccatcccctgcctattccaggagacaggacttgagtgtcacttcccctcctgctgtcttgtggccctgccatgcactgtggcaagtcttctgttatcttctgcctgagaggccgtgactaagaaggttccagacttcccgtctatcaaaggtgaggactgaattagactttcttcttgacagtggtgatcacctgtgacctgtgactggtacatgctcaggagggagtatactgttccactttgctgatttctaatgaaagattacttttacaggatggagggagaaagggctccgaaggagaaggaagaagaataagggcattggcctcagtccagatgaaaagacccagatgcaaaattatttgggccacatatgtgttgtttgcttatcaaattttcaacctttgaaaaatcacaatattggatggtgggaatcagtagcattgctggagttcctgtgggtggcaggagttggacattgtggcaggtgaccctgcaaaggataaacacagaacctgcagagggtaaaggatttcccaagtctcactcctggagggaggggcacaggcatgagcagcctatcgggccccatgtcatgcagctatgttctctgctgctggtgagcttggcatcgaaagaaaacatagcaggaatgattttgtctgggttggggatttgggggagtttagactataaatagtgaggaggatataaaaagccttaagaggatttttggaagccctaaatccaccacatagaccaaagcaagttaacaggaaccacttcggttttagtgaggtctaaatgtgactcagcatagtgccctcccctccactgttcccttccagctgtcgtggttcacgtgtccgctgtcaccacaacccttgccagcatctgccaaaccaagggcacgtgtgtcaggaggtctgctgccagcatgccagctgccaggtgctgcctagccttgaattacggcctggctcactccctaagggaaggcatcattggcagcctcttctgcagcagagaaaacggaagcataggagggtaggtgcctggtccagggtcacacagccagcaagtagtgggctggattccacactcagccgaggcccactctgctgattctagcataatttcttcaggatcaccttttgagtggacctcagctgcgtgtgggaaggaacctgcttgcctctgtgccttgcttcttggacacctgcggtcccagccttctcttttctgtgggcccttatttcatttaatacatggactcatcataaaacccctttgcactcctgtagccccagctcaggaagcctgaagcccaccccggtcaccgaggtgctcagaatcgatggagatccagagttgaaacctccctacgtttggtcctgtgtccccagggtctgctgccggctcctagatacctacaaacaggtctttactgttgactcttttaggaacatcactgtggcctaatagtgagggagtgacatttaggatgatggccgaccatctcatttataggaaaaacccagggctctaacacatattttaaaaatcactgcactgctggcacagccctgccacccagcattgtattagccaactccttcccaaggctctgggagaggctgcagtgggaacattccagatcagaggttctgccttgtttaaataggggtggagcgagattgccaggtctgaggcttcatcttgccagtgagaaatgggggtgcagggagctgttttagatgggggtgcagggaacagctgctgaggcctcaccgtgagtcacacacagggctggcagtgaggccacaaatcacagttgggcccccaaacataaggtcctacagccagggagagccattctgcctggagaccgagaagaatccagtcaggaagaaatagtggaagctaaggtgcccgggcctgaagggccagtccgtctgggagcagcaactggccctatggtgggacaggaagagcaagaaaaacagtgccagcttgctaaaggccgtgcccctgagtttgatctccaccctgctggctgagaagactcactgatggtctaagtcgtctcatgggagtgcctgggaaccaagactctggagacggcagggagggtgatgaggggcagcggctggagctagagagaccacctgggaagtgaacaccacagacagtgcgacagggccctcggctagggtgggaagcctggggacgggtgagggaactggtgagaggtgggagtcaggccgagcccacactgggtcagggcatgaaggccacagcatgcccttgaggccagggtctggtccgggtgggggtgaggaggttagaacaggctgctctggatttcagaggccacagagagtggagatattgagtaaggaggtgaagatgtgggacccaaggttcccggcctcttgaagacagcgtggggctgcgggtgcaggtcagaaggccttggaggccaggtgggttggagctgtgggagtgcccctcctccgctttccacccttcttgggatggagtccaaattcttgccaaggctgatgaagctgtcacagcctggcctctggccgtgcctctcatcccctctcccactaccctcctgtcactgccaatgcccctgctgccctgcctgccctctagctcctccaccacaccaggcttcctcctgcaccagggcctttgcacgtgctgatctcaagtgggccctctgcctggagctgggggagggaggcctgcacccaggggtgggagaaactgtgctccttcatccctgagtcaccaactccctgcattgcaaatcctcagtgtgatctctgttttcttgcttagtcctgactgatggtccacccgtctggctatctcctgtttatatcttcaaattcaggttaaaagtcacttcttccaggaagccctaaccatctcgttcaatgctcttctcgtatctgacagcctccactgtgtgcttgggggagggtagagaaaaatcttggatttttctctgcgtgaggttggaagccatggaggaatttagagctgaggaacggcctgatctgacttctattttcacacatcctctgtgttgaggattgatggcaggaggcatggccagaacagggaaggcatttagaaggctgttgagtttcaccaggtgacaggtgggggtggctcggcccagggacgtagcagggggcgtggtgagaagtggccggactctgaacggatttcaaagtagaaacaaccagactcaatgacagtctagacacgggtgtgctggggtgaagggaggggttaaccatgacctcaggctttagcctgagcagtggaaatgtggagttggcatttgccgtaatggagaaagctggggacagggcagggcggcgggggcgttttgtggtggggacggggaggaccaggagctcagcttgtaaagtgctttagacatccaaggagagaagctgccggccgcctggagtttaggagtccaagccagcgacgggctccgagagtcacccacacgtaacgtgcacctaaagttagagaatgactgagagcgtcgcgggagtgagggtgggtacaaaaaagaagccacccaagagtcggggctcggggcaccccgatgctaagaatgaaccagcgatggagactgaggagaggcggccacacaggtgagaggagaactaggatagcaggggccgcttggcagccacaagcggaatgtgcttccaggacaaggggtgtcagccgtgtcaaaggtgcaggaaggcctccaacaggaggtcagagaacggccccctggagttagcagcggacaggctgcgggggatggtgatgacagcgtgggtgggcttgagtgcaggagagactgaaatagtgggtggggagacttgcttgaggagttttgtgttgctaaaacgggaagaatgggagagtagctggcgagagtcctgtgggtttttaaagatagatggtataaccacatgcttgtacgtgcatggaggtaactcagcaggagaaagggtgatactgtgaagcggcggctctggggagctggggtagcttgggatccagcaggtgagggaggggaggtcctcagtgggccccaccacctgcggcagtgctgtgaggcagagcccggcgcaggtgtgggtggaggaggaagatctcttccgagaaaggaggtaagaaggaagcaaggctgtcagctgagggtgagtatggaggacgccagttggacaggaggggtgggcgtttcgagagactgccagaggtgtgtaatgatggctgccaggcgacagcagccggggtggctgtgtttcttctccacctgcatccagccgagtggagggagagggagaggacggcatggagaggcccgagagtgaagagcggcgtcatgtgacctttcctggaaccccggggaagtgaaggcaggaggtcagaggtgatgtgaaggggcggcaggggcaggaaggcgtaagaagccttctcagagccgggtgggggagctctggcacacgtgcaactaaggggaaggatctggggacaggaaaagattagagggttaggagtttggggaactgccagagcatgaccctgcagagggcaggattccctggggaccagggcaccaagggaggggcagctttggagagggacagggcagggggtgcagaagcaatggtgtttgtgccttctgtgctcttgaggaaagagagcagctaaagggcgaggacttcagctgcaattcctcagccccacccagcccggccacttcgtgtacaccacagcccagcaggtcccccgcaatgcctattttcccatgatgtatttctgcgctcagcttctcaaaaccagacttttgtagagagggataacctgccagctcttctcctctgcttgtcgccgcgaggaccccactcccatcctgtcttctgctctgctctctttgccgggactagggagggagccccagctcccaattcactctcactcgggaagaacacttaggccacaaacccgaaacccaccctggagccaaggggtgtcttcacacaggaaaaaggcacaccccactgctgggcttgtggacagtgcaacgccatccttgcgctgccgggcgtggggacagggaaggtggggaaagtcagagtcaccgctgcttaggctgatttgtgttgtatttaatttgtggaacacattaattctaaataatacttgagccttccttccccttccctcttgttcttcccctcctcccttcccttccccccctttccctccttccctacctcccttcctttccacttttcgataaatatttgcttggagtctgctgtgtgcctgagaaaatctatatgaaggtgatccaacagaaacagagagcaagaggtagacccccaaggaactcgcccagcagcctccacagtgccgcccctcgctaacagcatcctggttttgctcaatctggggcagcaatgtgctcagggagcgttccccaggagaagagcaaagactgatcgaaagcaacctgagccgccctgctcaccttgtctacgattacctggcagcagagggtgggcctgtgacccagatctggtaggtggggcctgagaggaagtggactggagggttaggtgcttcctccccagggagatgaagacattcaagagatggaaagtcgctcctgcgcttcttccctggaggctgtcttgagaggatatgatcctcccatctgtggcagtcatataagaataggagaaaggcaggtaaagtatagaaaagctaccttgagtcccagcatcactgagctgctgaattaacaaccctgggtccactaataccagtttcttgtttgcaaaataatgaattgtccttattgtctgcactcatttcagttgggcactctcatattttgtaaccaaaggcatcttacctattgcaacaaagaagaaataaagaactacaatttttctatcacatgtggctctgagcctcctggatgctgaggtgaaaagggaaacgagatgaattgccaagctctcattcttagtcaggaagagcttctcagggagtttcagcttttttgcccctaaattccctgtttgacactaaatttccacatgggagtttaggaaaggaacactgggatacataactgctagacccacggtaatcgtttcacaggagaagcagttttcaagggctctttcttaagaaaactaggatctagatataaagagagtttaagcagagaggagagtagagtgggagctgctccatgccctccccacccccgatagtcacatgtccccccaccccagcagggagtagagctcagtatgaatgagcagatactgaagagaccgctgaaaaactgtgtacaccgagcagaaggcagagcccagaaggacgcagagcctgaagctgcaggggagcaaaggcccctgacccaccactgctatgggcagcagctgtgagtgggatttggagtgagtaaaaaggagagaaaagaaaagcgtgaaagggagagaagaggacctggctggggaaatccccggtttgtagaaacctgggcttgggtaaaggtttgttggggacggtgggaggggctggtgggaggcagaggtgtagtctgccccggattctccatgtctcaggcccactggctgtgtgcgacctgcatcacacctcctgttcctggggaccttgggtgtttatctgggctcaagaagcactgtcaggtctaaggaatgactgtacgtcccaacagtatctcacctctgagtgctgtctggcccaaagtatccgaggattctcccgatagaaatgtatttgaaaattcaactgagccaggcaattactttgaaaaagcctttaccttgctgaggattcacaacagattttcatgaaaaatgctgtactctctgtaccttttctgtaggatatcaatagatgccacactcacacatacacagacacagcaaatatatttggaagaattcaacaagtttctttactgcaatatgtcttgaaggcattaatatcatatgtcatcaaatctaagatacaccctcaattggaagatgtgtcattatttaacatattactaagaaaaaaaaaacatccaagatggaaagtctcacaggagatgcctctctaaagatggaacaatgaaaggctcacaggagatgcctctctaaagatggaacaatgaaaggctctactgttggctgggcctggtggctcacgcctgtaatctcagcactttgggaggctgaggcaggtggatcacctgaggtcaggagttcgagaccagcctggctatcatggtgaaaccccatctctactaaaaatacaaaaattagccaggcatggtggcttgcacctgtaatcccagctactcgggaggttgagacaagagaatcacttgaacccggacgccagaggttgcagtgagccgagattgcaccattgcactccagcctgggtgacaagagtgaaactccatctcaggaaagaagaagaaaaagaaaaagaaagagaaaagaagggaagggaagggaagggaaaggagaaagagaaagaaagaaagagaaagaaaggagggaaggaagagagagaaggaggaggaggagaggagagagaggggaggggagggaaaataaagactctactgtcagtacaggggaaaatgagaaataaacccaccatggagaggaacagcaaggaatcatcaggtttctatcttggccctggcgaggggagggagaaatagggagatgccctgcactgatcattagaaccataagctggttctcacactggggtcacaccattcagcagatccccaaggagtttcaggagctgtgtccccagatcactggcagaagcaaaaacaaaccctctctggaagaactcaatttcagtccaggccagtgatgattgcaaaacaccaactgtgagatgtttcttgatttggggatgttaagatgtgagaaaatgtgcacccaggcatagatgaggacagtgagcccttatccagagaaggtcagagtattcagccctaactactctatcccactggagagcgcctggtcagcagtggtcactgttgccactatttatggagtgctgacttcatgccaggctctgggtgccaggctctgctcacatcagctcctgtcatcctcatagcccctctgtatggggacagcagcgttactattattttcagtagggcaaactgaagcaactttactgaggctgcacatgagtaaatgacaaagctgggctttgagtccacgctcatctccggtatcctgaaggtggtgtccatcagctatttttcaagggatgctagtctggcctgctgaacctagcatattgccaaaaatgtaattgttcaataaagtgtctattccctacacagaggcaatttctgcatcaaagtatgtcttatcacatcctagaaggctgtgcaaaggctcttgctgtcctgtggtcttggctgcgtgggtattcccggactctggccggataatcccatgcttgctgtaaagggatcagtggtgggcatgagaacacatcattcaatgtcttctcctcttttctgattttagaagatgtcagtataaatatcacaaaacttccgaaatatgaccaggctccaatcacctttctggtccatgtcctgtccctcctgaggctcgaagacctcaatctaggaaagcagcaccccctccctccccacagagctgtgtggacctcgggggccatgtggagagccagagcctgagtaataaatcccctccctgcaggacgactagccaagttttattacagatcctatcacaatgaaaagggctggtactcccgtgactgagctaatcccgtcaccgtgtgaatcaataggaaacccacaggaggcgattcgattcaggatgttcattttgggaagctggtcttcctacaacatcggagtcaagatattgccgggcacttccatgacaaatggaaagttcagcccaaaaggaccagacttgttagtaaaatacattcagatctctccaaataaaaattcagatgcattttagtctcccctcagtacagcaggctgaatcccttaatctaccacattattatggaaacacccttatctctgcctgtcaaaatcactgccgttgcgggggctccgtcttgggaggcaccagctgctttataatcatttagctgatgtgcagttacattatcttgaagcaggccacatatttgaagaacggcaccagatccaggatgaatctgagggacatccggccagcaggggaaggggaagagaggtaacacatgctgcccagacatactgctgctaggtgacaatgcaatgcctccaaccccgtccccttgactcaggccaatgtccctcttctgcaagccagttggctaggcagccagggccatgtcaggcagaggcagactgagagttctgggtactgtttctgtccaacaagtatggccggttctcctctagggctgccagtttgcatgagggcctcatgtctctccactggcaggggctggtgagcatccagtccatctgtaggagggacacacggtggctgtcttctgcagtgtgggcaggcctggagtgacggcccaagcagctgaccccacttgccaggggaacgcagggaggtgaagttacatctagtgtagcaaagcgaaggccatgtgggacgttgatctccaggttccaagatgggcccttggcaggagcccttgtgaacatggatgtggcctgttgggatggggcctcccaccacgcctcctgttctcccacctccattaggggtgactcacacctgaagaaatgatgaatcacgtgggttacaaaaccaaagggctcctgagagcgaggctggaaaggacctcggaaaccatctatgcagatcctgtcctcagcccatcccctctcgccccagcctctcacctccagctgccaagccacagactccaagtgaatcctgcacgctcaacaagagaccgctcctggaactgaccatcagagaagcagcttccttcccacctcaaggccttctcgacctttttgttttacttcctatattaagcaggttgatggcttgctttctggaagtgggccagtaggaccaatgggtcctgggagggatgacagaagagatccagcagcgatccttacccttcataattccttgattatggtgtgaacatttccatccatctccagggtgcttcaaatcattatccactggataccaggctgctccaggaagcaggggtgaggatgattcagctgactttctactgctggtcccagctcagtgggtgcttttaagagtgtacatcgtctagtgaacacctaccacacggcaggccctgggctcataaaaacgaacgtttacggacagcttattgtacagcaaaagctgacctcatcctcaaatcagcccgacggggtagatgccactgttccccgcattttgcaggtggggcgcctgccctcagccaccacagtcatttgcccaagatcgcagcgaggctaagcggacggcctgggggttcacctgcacggcctgggggttcacctgcgcggcctgggggttcacctgcacggcctgggggttcacctgcgcggcctgggggttcacctgcgcggcctgggggttcacctgcacggcctgcctcccagcatgggccgcggcctccgccatgggctccgtgcggtggtttctcgggtacacgctcgtgagcccggctgatgcgccacatgcctttgccccgctcaatgtgtcccttcagccaggcttggtcccgggcgacccactgtcttccccgcagcttcttctccctgggaccccgcacacgggcgagccctccgtctagggaggcgggcgaggccgccaggcgtctgaggcccccgccaggtgagtgcggccttcgggtgtccggccggtctagggaaccggggactcacctgagacgccggggcctccccgctcccagcagaactcgcgggccgaggacgcctctggggcggcaccgcgtcccgagagccccagaagtcggcggggaagttcccccggtggggggcgtttcgggcctcccggacggctctcggccccggagcccggtcgcaggagcgcgggcccgggggcgggaacgcgccgcggccgcctcctcctccccggctcccgcccgcggcggtgttggcggcggcggtggcggcggcggcggcgcttccccggcgcggagcggctttaaaaggcggcactccaccccccggcgcactcgcagctcgggcgccgcgcgagcctgtcgccgctatgcctccgcgcgcgccgcctgcgcccgggccccggccgccgccccgggccgccgccgccaccgacaccgccgcgggcgcggggggcgcggggggcgcggggggcgccggcgggcccgggttccggccgctcgcgccgcgtccctggcgctggctgctgctgctggcgctgcctgccgcctgctccgcccccgccgcgccccgtctacaccaaccactgggcggtgcaagtgctgggcggcccggccgaggcggaccgcgtggcggcggcgcacgggtacctcaacttgggccaggtgagtgcggccggccccgcgcgcccaaaactttcccggcggcctccggcgcgcgcgaggggggcgcctccgcagtcctgtccgcccggccccggccccgcgcgcgcgtgggaaggctccgggaccgcttggggacggcgggcggccggggcgccctgcgggggggggtgtcgcccgggggggcgcgcgcgggacactcggcggggtgggggggactggggtcccgcgtgggcgcccacgcaggtccggcgcgccgaccgcaagtcccccggcagtgccgcccaaccccgcgctcggaagtgtggcctcagaagccggggcggcgcggacacctgccgggctccgggggagtctgggctgcctcaggcgtcgcgcgccgtccgccgctgggtcctgggcgcccacccggctctcccccgcgggggagcggcccctctgccctcgacgggcggcgcgagctccggacccggtgcgcgcgccaaggcggccgcggccgctgcttgggtgacatgagcgtggcccggcgtctcggggactcgcgctccctcggtgtccgcggctcccgggggtagatggccgggagcctgcaccctggagcccggccgccgtcggagaggccttgggacagcgcagggccgggggtcctgggtttaaaacctctccaggagcggagggagggcgctttgtgtgggggcttctgccgcggttctgatggccgagcggtgtgacctttggcaagtcgctcccctgacaagctcctttgcagtcagtggcaatgtctacaccgctgggttgtcggaaagatctaatgctgcgttgccacagagcctggaccggggcctgaccctcaccggcccccacggggccctcccagccccgcagccctcggctgtcccctcttctgtcagtgagcaagcaggccacgccctgggcacaaaggcggcattaccctcaaaggacctcccggcgggtccctttttcctctctcaaccagctaccgggctgaggggcggtgagttggggttgatccatgtttatggctcctggagaggccgttattttgaggtcacaccaggggacctctcagtgcagttaacaaatctacaaactacacactcagagggttaagtgaagtgacagggaagcaccgactcataactctaaaccttagtgccaggcagtgttaaatgtagtttcatcgttatccgtggcagaagccagcaaggtgtggtggcgtccctgattgatagaaatgacattagttctgcatcccaagccccacgttgatgtactattaggtgtgtggctggaggggtggattccaccattcgaatgaaggaatcttcacaaggcaggttcgagtttactgaaagaatgctagcacatctttggagaccttttaaatatatgcatatatatatataaaatgttacatatatacacatatacacacatacatatacgcacatgtatatccatatagatatttagtttttttaaccactcaaggccctccaaacatcctgtgatttcagattttgccgtcgggtagcactgacttcgtttgtctctgtagttcttgactctccctggctgattgtccaggctgaagaaggtgttcctcatgtttgcgtagtgcccctggctcctgccacacttcgctgctgtgcccaggtggcccagcaatttgtcttcagctaaaagtgactcttaaactacgcgataaattacaaagtgcctgggttttgggattctaaaattaaatgagcagaatggagctgaaattgagctgtgagctcacactgcaagagagaggcagagaggcacaggtaactctccccggaaatttctatctgtgggaataaaaatgcctaacccttggccatgccgcccctttgagacaacctctgtcaggctcactgagttcttagtgcagtctgctctcctggttttgcggatgggagagaagattcgccccgatgcacactccgtacccaggatattctggggagttaatcggggtctccccagctctgtctagtgcagccagcatgaatgccacgcagcccggtcactcaggcatggtgctggcagtggcactgcggtgacattcactaacagagattagctggttggggataggagctgtctcagaggcttgtgtgtgattactcacggagggcctattactctttattccaaaacgagcttttctttcccccctctaagtgcactgctaatgtggaaaaggcctggagcatttgagcctctacccactcaataagaactctttgaaaaccttatttgcctttttttcagccaggagaatttgtgactcataaataagatgtagatattattagctttgacttacagatgagtaaatgggggtgaagtaagggaaggaagctgtttgtgttcacatggtacgcatatgtcacctctgacagttccatccctgctcatttgcttctgccgtattctctgttctgaggtctcctttgtgaaactctttctccaagcccttaatgggcaattagtgttatgttctgtacttgcctgaatcgcagccctggttttctcccagatagtcgctgtgctcaaggttcttgcttgttttactttcttccatacaactaataactggattcagtttatttcacatggcccagaggtaatttagactggtggttattcacctttcttgtgtcatggctccctttcagcacctgataaaggctgtggatcctctccattgtaaaatatgcatcaccagggacaagacaagacagcctctctttgtccctctactcatcagtccaggtaacaccacaggatttcaaagggaataaaaatgtggaagtgtccaatgtcattatcggcagatgacataactacatggataatccaaaagagcctggagattaacccctggagctaataagggagttgatcagcaacagccacctgcatggcagcacatctgagaagacgaaagaaaccattcttcattcttgcataaaagctgttagatacgttgaaataggtcttttaaaaaggtgagacttttatagagaaacataaaatatttagaagaaggactgagaaaagaaagtttaggctgggcatggtggctcatcccagcactttgggaggctgaggcaggcggatcacctgaggtcaggagttcgagaccagccagaccaacatggagaaaccctgtctctactaaaaatacaaaaattagctgggcttggtgacacatgccggtaatcccagctacttgggaggttgaggcaggaaaatagcttgaacctgggaggcggaggttgcagtgaaccgagaccgcaccattgcactccagcctgggcgacaagagtgaaactccgtctcaaaaaaaaaaaaaaaaaaaaaaatttaaataaatggagagatgcgttgtgttcatgcatgggagggctggctctcatagttgccccaatttaatctgcaaattcaatgtaatctagtttaagctgtgacaagatttaatgtggaatatgaaatcacacaaatgaattataaaattcatatggaagagtaaggtccaggaatacctcagacaactctgggaaagaagaggaggaggggagttgtggtaacgacagtccagcagtagagtcaactcaaacccaagcatgtgtgggaacttgtatgtgtgagctgaagagttacaaatagatggggaaggatgggctatttactaaatggtgctgggagaacaggctctccccatggaaaaacaattagatcctcacattacacaacagtacattccagatgggattaaagactgtatataaaactttagaaagagctgcagtggaatacctttgtcacaccgggaaaggagtccctacacaagttatgaaaataaatttcaaaatgaagagactgatacattaagataaaaattctatgtaaacaaaggcatcctaacagagttaaaaagcaagaatagaccaggaaagtatttacaatatataacaaatacattagtacacagattattttgaaaactataaatcactaagaaaaaaagatacacgccaggtagaaaaatggggaagtttatgaatggagaagtcaatgaagagaaatccaaatgaccagtaaacataagaaatgatgcccagcttcactcaagttcgctgggggttattggagcactgcaatttaggcaacgatgagataccatttcacacctattggatttcccgacacggaagagtgttagcatcacgtgctggcaaggatatagagcaatgggaactttcagatgctgctggtggagattggtatcgtttggagagcaatttggcgatacacggtgaggctggacttgctagtccacagccagacatatcctggaagaactctcccacgtgtgcacaaagagacttgtataagaatgtccatgcaggcgtttttttaaatgaaggaaaacccaccttccctgaagtagaatagagaactaaatcaaaatagtcacaccatgcaagactctacagtggttagaaatgaataaaccagatctatatctacacagatacatctctcaaatagtgttgagagagaaaaaaggcaaattgtaggtgtccaatgtgatcatattcatgtaaacgttaagaaacacacaaagcaggccgggcgtggtggctcacgcctgtaatcccagcactttgggaggcagaggcgggtggatcatctgaggtcaggagttcgagaccagcctggccaacatggtgaaaccctgtctctactaaaaaaatatgaaaattagctgggcgtggtggtgcacgcctgtaatgccagctactcaggaggctgaggcaggagaatggcttgaacctgggaggtggaggttgcagtgagctgagatgaacaggactgcactccagtctggccgacgagtagagtgaaactctgtctcaaaacaaaaacaaaaacaagcaaaaacaaagcacaaagcaatactgtattaattatggatgcttatagatgtagtaaaagtataaaagtgtgggctgtaaggatctgcatcaaattctagttagcaatgacctccaagaagggagggaggggagaggaacttcaaactttatctgcagtgtactgctttacaacacacgcttatgtgtgtgggtgtgtgtatgtataaacatacgtggattatatacaaaattgtgcctagacattttgtactttttttctttgtatcagggtatattacatgtggtgatgtgtacaagtgtgtatatatacacacgtataatatataaacacacgtatattgacgcatatacctatatacatagacatatacacagatacacataaaacattgaagagagaaaaaagaaaagggagatgcacatggtacacctaccgcatggtgcttctggaccatctgaagcccaccgctggaggcaggtgcctgcaggcccatgttaagaagtccctactttagatgtccagactgggccgatccacttgtcaaggaaatggtgacagagaaacagaatgtctggctgcaggtcgcatgggcgtttggacagagctggacacggagcccaggaacccttcccttctcccctgcttctttctccttccagtcaccctcgctctaacctgtgtgcattgtcacctttgacattgtgactcagaaaagacaagttgcttgtgtggagaggatggcagcaaggtattctccacataccaaatcacaacagctcagcgtctgctgctcttggaaatgatgtttatcttaagggtggttcttggatgccatgctttcccttgggtttttgctttgcctggggtattgagctaatttgttgcttctgagtctgaacataaaaaggcaggctggctgccagggccctaaaagatctaagagccttaaatgatcttgaacttgccttaaatagttttacttaaaatagctactgagcaggacatacctggcccagaatttcaggtgagcctgcacgattcatttgtcagcagaggaaaattgtcatgctgcagacaacttgttcttgcaatgaaaaacaagccgaagccttaaccaggtgttaaaatgatgggccagaacttgttccagccacagcgtcaggggtttggtagggacaaggggagacccggaagagcagtcacctgtgacctagttctctgggattggttttcggtctaaggctgtcttggttttatgctctgagccaagctggactggctgtgcgcggctggcctgcgagaggttctgggtgtgaactgagggacagaggcaagatgagggttgtgaagctcattgtcttaaccctcctatctgacgtcttcacccggatggtgatgcctttaagtgggcaggagtttaattgaccggactgccctcctgagtcattggagctggtgcggggagtggtgatcaaagccgagccagctgccatctctggagccagaaaagctccagaaggcagcatccagggcagactcagaatcaggactgagcaggtgcaggggcagactcagaatcaggagcagactcagaatcaggactgagcaggtggctcagctgactggaccattagaaaggcttgagtttctctgggcggaaaccagggaagcaaatgagaaacacggagctgtcgatgggctgggggaggctgggacaccgcctgatactcctgccggctttgagctttgggtggtgacagggacactcagggctgtccagaccctgttctccagtgtccgccaactgcatgccggctgggaacgtcctgagcttttttggatctctgagcctctacacagattgtggcatctagaaagtagttcctctgatcttctgcagctcagccaggctgccgacacctctcctcctcctttcaccctgccctgggagggcttccgggttgtacttgccctgggtggctggcctcctcctggctcctgggactgggtcttggccttgccaccgaccagaagccctggtcttgctcccaccagctgatgtttctcctgactattgctccgaaggccctcaccagccctgcagggaggtgtcaccaggcctggttaatggtgatgaggccttagacccaggtaccttctgacaaaccagtgactgacaggccagggccggaccccacaccctctgactcaccttctactgctgtcacctcgtacctgcttcccagacaaaggtaaatcatcagacagaaaagcctttcggcttctgccagaatgaacagacaagaggcatagcaacctccggagaccccaccagccgccgtttctccctctgtccaccgggtgcgtgcacatgcgtgtgcgtgaacgcgcacagactcaaagggctgcacaccagcatggctctgtctcggggaatctgtactggctcctgctcatcagcattggaaccactcacacctctctctattggagggaaaaagaaaagccctccagtccttctaggaagccactcaaactacacatttgagtcactcacatttcagtcactcaagctgcacatttatcagctggactaatcatcttttgctgaaacctcctcctcgtgtgggtccctgtctacaagaagagacccctgtctaccttagtggcagagctggaggcctagaggtcaccatcgcctcctcctgctcccgtgctcccccaagcctgtctcactgtctcctgaatggctctcaggctccctgcattgcccctgccaccgcccagcacaggctgtggcctctgtggcctctacctgcctcagggcctcctcctgccccaccccaccgcctcgagccctggctgtagctgcagctctgcccatcccccatcttcatgcttttgcttcctttcaggctttgcttctgttgttcttcctgcccagaacggctttacctgtcaccaggttcgcccctcagccttcccacccgtcaccaggttcgcccctcagccttcccacccgtcaccaggttcgcccctcagccttcccacccgtcaccagattcgcccctcagccttccaagttctgctgcactgtcagttccatcagccgactcaccccgatttccccagcccgccggatgtacccttcgtctgggcccccaggccccctgccacctggacgttgcctgctggcttgcctgtttctgacactgggctctgggcttcctgggtgagtcagcccaaagttaggcctctggctgctctctaaggttagttccgattctgccacctctgtggtggccggcagacgtgcgttcatttattcagcgagtattgctgtgtgctctcactggcctgggcacttagagataagaaaatgtggcccctgccttgcaagagtcttaagagactcttggttatgagtctttgtgagggaccaaggccaggcacctgcgctttgtttaagtgtcatttattgaaccacccccaccatcgctttctcatcccaatcgtttgctttttggagtcactcgataggccctgccacgtacgtacttgtacatgaggacaccctctttgtgatgctgtagtttgcctcttggccaggtcagctccacactgatctgagagccctgtgtcccctgaaggccccactagtgccctggaggccccactggtgccctggagctcactgtggatgcttcacaccctgcgggtcccatcatcccatcaagctgtggtttttcctgatgtccttgtgcctctgccctttgagcatctggaggacccagcagcaggcgcaaggccccctgtctagtcctgcaaggaagggggatgaatagccatcagctgtcaggagcctcacgctccatgggatgggatcagcagcctagggttcccatggcaaccagcccatcaatgccctcagtgtcaagacaggggcaccgtggaaaggaagaaagtctcattgtcttgccttggctgcttgggcataaacaagctgcgctccacagggccccgcagccacgcccgacctgtggctctgcccagccgcacatggacccatttactgaattgggctgggaagaggctgtcactgttagttctctaatcttcctcgggggctcttgtatttctgccaccggccagcatccatcacttctagagtccttgttgggaaaatccatcttctcagtgagagtgggcagaaacagcccaaatggagcagactaccgaagctctgagtgatcagccagaccgccctggggggaatccatcagtgggtaatggcatcactcacgttcctgcaaggaacctggacttccagactttcccgctttggtttcaaacaccctgatgacaactctcagacatatctcctgtgatcatttaagcagatcaccttgagatgaccactgctgggcttgccacaggcggacagtctaagaaggtcctgtcccccttcctggactgtccccctgggaggaccccagcagtggtcacttacaagagcttccttcttgccttcaaaaggcccaagttcacctccctgatcattgccggactcttccctgggtggagatctgggaaggtggtggaggggaagggaggggctgcctcgtgttggataagggccctcccaccagaggtcaggcctgctgttccctgtctagtagaaggctgcatggaggtgctcctgtgccccacaccgttctgctcacctatcttgtaccccgtcctccagatgggaaaccagatgtctctctggattcctcccaccagcctctgcatgcaccgaccacagccctgtccgaccagcctctgggtctttctcccctgccacccagcccatggccacagccgaggccgggcctgctcactcatactctcactggtggtgagtgtcctggtgactgcctcactggcttccctgcctcccttccaggccatttcccacacggccatccgtaggattcttcagagccccactgctctgtgctcacccagaacccttcacttttaccacacgcatcttcatgaagtccgggcctttgacattcaggacactttccatatgctttttctttcttctgcacctatctgttgctgtcgttttaacctgggggccccttccttgtgtggtctacccgggccctgcccttctttggcattagccaaagtgctgcttcctgacctgcctgcagccctgtcctctccgagctccacggaggggctcggccatggcgtgcggggtgtctctctccccgctagaccctctggaccacagcgtctcatagtctgcgtctttacgtgactcattttgcttcctgaggccctagtgcagttcctggcactgagaaggtttagtgaatgagaaattgttagaattttttatatcaggacctgtgatgtcctgattccattcaccaaaggcaaatcatccttaagcgtgagtatggagaaaatgctgaccttgttatcttcacttctgctgagctctagcaggtttgtgagcagcaaatatttgtgatgtttctgtatagtcaaatatcgcttatgctttccaccctttgacatctcttggtaccttgcttttgggttctgtgtttcctgggactgagtcttgctgagtgattccagtgtcacctgcagggactctgctctcaaggccaaggcagatgttcagtcatctgtgccacgtggctactccgaggcagaaccggcaagtctggacacacctagcatcctagcctggtgttctctgaagctcagaacgagcatcttgctccttggtgggcagaagaacaagaggaaaggaagccagaaaaagaggaccggggaagccacagaagagggagggagggaaagtgggaaggaggactgaggacaggaggcatgggtgtgtcctgcggccttggtggagcctgtcctgtggaaggtttattttctgtaaagaagcagtctggctcgtgcctgtactcagcctctctgtccccacacgtgactgtccttagaatagcaactgggtcctcggattccagtaccccaccatgactgccgccagccactcctatgtcagtcttggctgtctgccaggcactgctgatgattgcccccagaaccgtactattaatcccattacacagatgagcaaactgagacccacagaggctgagtaacctgctatagtagtaagggtcagagcaaggctttcaacctgggcaacttgcattccaggccttcctcatagacagagtctgtgtctattaggaaaggctacaaggagcaggtggcatgtgagccgccacggagcttggcttggggctttctaagtggctagggcagaggggtgcagtccaggcagatggagggttggggcagaagggacctgtgaagaagtcctcctgtactatgggatcctcccctccttatcagggctctggcctggagctcagttcaaaggcttatctatgcaggaatgaaggcaacattcttgatgtagagtctaagagtctgaaggtcagggaacctttcttggataccctcctttctgcctaccagaaccctgtgtttcctgcctgctgggaggcaagtggaacacagtagaaccagatcccaagaggagagaagaggctggagggggacccacagttgcatagagggtagcatggcctggttataagactgtttacactacttgattcctctcagtataatacagaaaggatatgtggatacagaatatttttgcaatacagaaaagaacaagaaaaccataaaaatcacccatagtcccaccaccccaaaataatcactgttgacactttgggccatgactttttgttttgtgattctgtgtctgagtgtgtgcgtgcacactcatatgcaggttgaatatcctgtatctgagatgcttgggaaaagaaatgttttggagttccaattattttagattttgaaatatttgtgttatgttcacttgttgagcatctctaacctgaaaatctgaaattggaaatgctttgagtgtcctgttggattttggagtattttagattttcaggttagggatattcaacctgtgtaggtatgcatgcacacacacacagacacacagacacacacacacacgcacacacatatattcaccaatgtcttatacaaataggattgtctacttttgcaacttgtacctcccacgtcaataagtcttctatggcgtaacttgtaatggctgctcagtgtaccttggcgtagctggcccatcatttgtgtcattctttcctgacgtttaggtcagtgagttctttatcactgcgtggggaggtggatagtgctgcagctgctgtggaaggtcaggaccgtgcagggaggtggaagaggctctgccactgcgctgcttccccgccccacatgccctgggtccctggttatggcgtctcatcccacctacctgcatctcccgtccggcatcaccagccttgcagagggtccacacttggtaacatctgttcagttcaactcattaggattttatcgagcatttttatttaaaaaattatacattgcatataaatttataaatttagagtattatataaatgctcccccattgtaaagaattcacacagtgcaggtgtacaaagcaaaatccaaaatctccttcctcccctcatccgatccctgatttactccttccctgagatgtcaccactgttcacacattagtatatgtgtcctgtttctgtgccttaacagacagatacgtgcgcatatacacacaaaaagaatttttgttgttttttttttttttaatataaatggaatcacactaaacatgtttttttttttggacctacctaggttttcttcactaacagtgggacgtcttgggaatcttcccatgctcgtacatagagacctacctcattctttttaaatagttttatggcattttagagatgcaacatgttttgttataccacacctgtgaatgttcctttgatttgcctccagtttttttctgttataagcagtgttgcagtggttatccttattcatgactctgcacttgtgagaatttctgtaggatccataagaacaaaacaaatactagttataataataaatggtgattgctggcccttactgtgtaccaagtaacttttcatgtgctttccttgtattgactcatttaatcttagaaactctatggggtaggtgttattattaccctcattttacagatgtggaaacaaaagcacagagaggttaagtaactttttcccagttacacaacttgtaggtgccagagccaagatttgaacccgaatagtctgactccagagaggggacctgctgagtcaatgtatgtgtgcaagttacattgtgttagatgttggccatggctctcccaacagatagtgccagttgacactgcccccagaagtgtgtgtgggccccaccgattttgtgtagtgatgaccaattgtcatatttgccagttcttataggtgacaaatgagatctggtggttgttttaatatgcttcttttccctcattgttattcaagttaaatgttgcttggccagcacagtggctcacacttgtagtcccagcactttgggaggctgaggctggaggatcatttcagcccaggagttcgagaccagcctgggcaagatggcaagttcctgactctacaaaaaaaaaaaaaaaaaaattagccaagtgtggtggtgtacgcctgtggtcccagctactggggaggatgaggtgggagaattccttgagcccaggaggttgaggagtcagtgagccaagaccacatcaccgcactccagcctggacgacagagcgagaccctgtctcaaaataaatgagtaaataaagttaagtgtctctttatttattaggcattttaatccttctctgaattgcttatttatattctttgcccattttttcagtggggctgtttgtcttttaatgattgctttctctgtgttgtagatattcatcccttgtttttaagtacgttgcttttcattgaacactgttcagagtgtttgttggctttgcctgttgttgtttgaagtaaaatctgcagcaccatttgtttgccaggctttgggctcgtcactcagtgtaattcagagatgagtaagacaaagtccccacctaaaatagacagcacgtaactcttgcgagaggagtagtgaacggaatataggggcggagtccaaatgttttaggataagtgaggagaatggggcagcctctcaactggggattcagggaagcctttgtgaccagtggcgctagggccagacctggaggggtccatagaatgttcacagaggaatgggaagtgggggtgtgtttgggcagatggatcgtgagtgctttaatctgcatcccatccgaaaacaactcaccttcaatgacccactggaaaagagtctcatgaagaggctacttacagggtgtgcatggggacaagggaaccaacagagggtgttgaggtacccggggactgggtaggcagtggtggggagctgctgcagggatggaggcaaaacagtgttagcagatcctgtgggagctggagctgagtagggtgcagcctccttctggtgcctccattggcctgggcagtattgcctggagggcttagtcttctgcagcactgagcagggcagagaatggtggagagtgggtcagaggtgtcaggggaggtggagggagaaaaatcagctcagtaaggataaaagcagagatagaagttccagatgtgtgaaggcctcagcaatcctcgatgccattagagggtaggggggttcatttgctgctggttttacttagcaaacatttattggatgctggctcaaagcctggccccggacgaggtgctaagttataaagatgggtcaggcaggctgcgcaccccagtgatcaccgccgtggcgccagttttagctttccacgtgtcctctccgagggtcacagcagaggcctgtggttttatgtctgttagaccccatgtacctggatctgtgcctccttgtcccagttggagtttatttaggtgtgtctgtctgaggacagattttaacatggaaaaataagtccatttttggccgccattgaattcagtctaacatacatcttgatcttctgctgtttttttccaacttaaacaaacaaacagaaatcccaatttgtgttcctcttgataaagcccaatttctatagaaagaaaagaaaccttattgctgtcctatcaaagtaaccatttatgactgagctcattaacagtcttatacacggttctgtttctcatttgcaggaatatgatgccgttagccaagaacaagaagttagatttgtttcagaggcttagacaactttatgtatcatgactttgataatctaagaccctcacaaccattcattcattcattcattcattatttatttatttatttacttatttatttgagacatgagtctcactctgtcactcagggtggagtgcaatggtgcgatctcagcttaccgcaacctctgcctcccaggttcaaggaattctgcctcagcctctctattagctaggattacaggcgcacgccaccacctccagctaatttttatatttttaatagagatggggtttcaccatgttggccaggctggtcttgaactcctgacctcaggtgatccacccacctcggcctacaaccattcattttagcacaagatgcaaaagcctgtctgtgggaatagatgctttctcttccccatggagttctgtgaactcattagtactttctaggatttttgtttgcttgcctgctttttcaaggaatttgctattctaccttgttctgatatttggtcaaatcagaaaacgttagaaaaccaaattgattctttcttacactaaataatcttaaaatccaaatgaaggctaggcatggtggcttatgcttgtaatcccaacactttgggaggccgaggtgggaggatcctctgagcccagaagttcgaggctgtagtgagctatgatcatgccactgtactccagcctggatgacagagtgagacactgtctctacaaaaaataaaaaaattagccagtcatggtggcatgtgcctatagtcccagctactcaggaggctgaggccagaggattgcttgagcctgggaggtcagggctatgcagtgagctatgatcatgccactgcactccagcctgggtgacagagcgagactctgtctctagaaaagaaaagaaaacaaaacaaaaaccaatccaaatgaaacctcagaggtaggtatggacacattagctctgggagactgtcaatacaaggctcacattgagggaccagaactaacagacccacactatcacaagccaggtcttaacagccttccttttccaaccagggaagggcagctctcaaacctaaccagaggatctttccactttctcttttgattgttactcataaagagccctggatgtattttctattttcttctgtcaaaagttcaatggctacagagaactatagaaaatcctgtcttaacccaatttattttcttattccaagttggttctactttccagcaattggttcctttcctggaggtagttgctttgtgcttggtgtgtgctgatggctgtgccagcctgggcatctcatcatgccagggagctgctcagcctcctccctggtctctcctgaaaactgacctcctcagtggagtctcagtgaccaggcgccaccattgagagatccttttgtctctccaaggttgagggaacctgtttgtgcacttgccactgtcattctccccacagcgtcagttttgtttgaatcgtgctgtcaggttgcatgaattagattgcaagtctcgagcttgggccatgtttctgcatgcaccgtgggtgtgaaactgatgcctggcagattgtcccatcgttagaaacactggacagagccggaagggagcagccatgctgcccaacccgttttcaatgccatgactttgtcctgaggcctcttcagggagctgtgttaacgttgagcccagtttgatttctgcgtcggccccttcatagcagaagacgacctgctgactgctgtggccaggccacctggccgtggggctttgaggagagactcaagccaacaagtgccgtcagtcagagcatgtctctggtctgcctgtgtccccttgctgggttctcagcaatctggggcgatgcctccgttcgatttttttttcctcagaggattatggagttttctgggtcatttagcttttttttatcacaatttcgtgtttcttaggtccatccataggagaatggaaaaacaaatgtgatacattcattcagtgagcactcttttattcagcaatagaaaggaacagacaaccagcatgcataacaacgtgcatgtgtctcatagacaggccaagtgaaagaaaccttacatgagggtgcctgactccattcagaggaggttctagaactggcaaaaccaaatgtgggggcatgaaagctggaggttgaccgggaaggcacatgcgagactttctggagtgatggctgtcttctgaatctcagtaggggtttgagttatacaagtgtgtacatttatccaaactcaacaaatgtgtaatttacttttgcttgtttcatcatatctaaattttatctcaaaagaaataaatctataagcaaataatgatgtgtatgttgaagtctttagggagatgtatgttgtgtactgatactgcagtttactttggaatgcaccaaaaataagatgtgttgacaaatggatagaaggatggatggatggagagaagtttgatcaagtgattttagtgaatatgttaatggtagaatcaaggtaatgggcatatggatgtctgccatacaattcattcaacattggtgcatgtttgaaaaatttcatagcaagatgttgggagaaaggtatttttgtggacgtgggagagaccccatgttgtctttgaagacataatcataaatttatgtttagagatgaggattagaagcctttctagggatttagtagggcaaatgatgtcatcaaagaaatctcctggaatctgggttcaggggcatttgcttttgtagaggatgttctggggctacactggcatctgaaaggattactgtggctctctgagccactaacttgctaggctttccccaggcagagtttcagccccagggagaagcttcccagtaaatgtaaatgagcagagtccgtggtttaaggaccttcctgcggaggagagagaaggaggagagataagccgcagacacccctggcacggcaaggtaggctgggttgcttgcctgctaattatcttctcggtcttgctccgcagtgtttctctagtttcagaatttgaattgctgactttgtgtagaattttcagcctctcgagttgttgaattgaagggcagcaccacagccattccctacagagtcctaacggacaggcgtcctatgtcggaatcctgatcctgtgtaaccccggggatgtaccagggcaaatgcagcaaagacacagcggtcagactccttgtgggagaaccccggcctaggagaagctgctggtaaatttagggcacgttggagaagtgggggtggggagagaagagaagaatgaaagcattattctaaggagctacttttatttatagattctcctaattctattaaaatgaatgccggagggatgtaaaacttggaacacataacacataatagaaatgaaaggacattaaactaaaatagggaaaaatggtaaaatgagaagagaatcttagtaccaagaggaagatgtgacatttttctgaaataaaataatcttacagcacagtgtatggggaaagtgaattaaataaagtaaggacttggttagcagaaaacttggaaggaaacaaaatatttcataatgaaaaggagaaagtgttaagctgactcaaggggaaaacacatacagatattacactaattacattataaagacagataaataagatgtcattgttgtaaaaggaaataaaactaattaaatgtttaatgtgctttaagagacattggtgaaataaaatatattaactatggtaaaatatgtgaacaggcataattcgcctgccttgttctggcagccagcacagtacctcacctcctgtgtacaaaacaagggacgtttgatccctgagttggaatggttcagctctttcttcaaaaaaaatggcagttagaagcacctccaacaactgaatgtttgcaataatgccagtcccgaagtgagcactcagcgcgtgttgttgccagtcatattgatatcatcacggcgattatcattagcactggatgagagagaaacagcacgtccttccagcgtcaggccttggagtcagactaggaaagcactatttttaaagtaggaatttaaagctagtaaaaagtgtcacggagaagatttcagatccactgtttcttttaccttttgtgttggccgatttgaaaagcttaggatggaaaaggcagaagttaagccaaactaggagacaaactgctgagccatgattcagcagctgggacatttccagcctgcacaccgtcctcaccggctcccagcgaggcacccggctctagccgctccattcagcagcgtgtggacacccctgctcagtccttcgcctgcctggcatgttcttcggggctcgtgcccaccaccactgacgcaaaagaggaccctcttgcctgaaattaattaactaaggattctctcttaaagatgaaagaaaataaaacttggggttaagatgacagacggagggtctctcggcacttcacccatgtcggcatcttggagccagcgtagaagcttatgaaggaatggtttctcgcctgcacacagtcacgcagggcatgtagcagctctctacacacgtgcatttgcctgtaaactacaaatgctcactgtcttcattcccaagagactgaagtgcctggagaggctggattattatcctctcccccagcttttcttgctctgggcatcacttgggatggattgtacagaaaactgaccatcttaattaaatgagcaggagttgtaaggctcttctagaatgggagggcaaaggtgggagtgttttttctccctgtaatagtcaaatttccccagaatgcctaaaaaaacacgtgtttctcatagcgctattttgatctagtagttcttgcaaaaagagctagtgacaaaatgagaactttgagatcagaagagctgggtacgaatcccagcactttcgacgacaccttgatcaacagctggggacctctgacatccttgaatgtcaaatcattcacctgtaaaatatgattgcaacaatcattgccaaaatagaattctatatccagctgttgtgaggattgcagcataaacttaaacctccgtgagacgagctgtcatcactagtgcagatgtgaggtctgtctccttgcctgacgggcacactccatgctgatcctagagagagctgtgccttcctgtgtggatacctaacagcagtccatactgtgaccactggcccagcatcaaggacgtggatggccactcccagttattagtaccaactgctgtctccttcatggacattttgcctgggatggttctttattggattttggaggagccatacaattctgggtgtttgtggagtcctggagtcatggcccaccttctgacacgagagctgaaatttggaagcatcagatttctgtgattttatttaaccagtaatctaaaagctcctgctggaaatggagagtttgcatcctgctaaggaataatatgctggatgtcacccaattccagagcatcatcaaacagtagctaggaatgtattcagatgcaaaaagtagatgatagtggcttaaacaaagtggggctcactgttttcacacagtgaatatgaagatggaccatccagggctggtgctgtgacgatgatgatgatggtgacaatgacaaggatgacaaactcttactgggcaagaaactgctctgagggcttgatctcatttactacttactgctaacccacaaactaggtactttccctgtctccacatcacagatgaggaaactgaggcacagagcattcagatgacttaacccaattagaaatggcagagccagagctgacaccacacttttttctcctttgttatttttgaaacatgtttaacatttaaaatctattatttgacacatataaaatatttcccacaatatatttgttggttatacaaagtataacaatagaacctgtgaagccaccacccgtccagtgactaggctattaccagtattacctacgcgttccttgcaccctaccacctgccagacacctccggctcccgcaggaagccactgtccgcgtggcttgcgtatctccggcgtagatgtgcttagacaacgtgttgcttagctttggttttgagcactgtgggaatgatgtactgtgtggggtattctgagacttgcttttctccccccagtttaacatcgtgtttctaaggtttagccacagtgtggctatggccccagcttagctgtggttctcttactttcactgctgtgaacactaccgtgttttttggccagcacatctcaatgtatctgtccattctcctggcatgtttgtaattcttttttaagaattgttgttggccagtcgtggtggctcatgcctgtaattccagcactttgggaggctgaggcaggtggatcacctgaggtcaggagatcgagaccagcctggccaacatggtgaaaccctgtctctactaaaaatacaaaaaattagctgggtgtggtggtgggcactcgtagtcccagctactcgggaggctgaggcaggagaattgcttgaactgggaggcagaggtggcagtgagccgtgatcgtgccattgcactccagcctgggcgacagagcgagactctgtcttgaaaaaaaaaaaaaaagaattgttgctaagaacagccttatacaagaccgctagtacacaaatgccagagtttctttggggtgtgtgcctagaattgggattactgggtgtacatatacggcatatgaatcctttgtcagttaacaggagtgggaaaccgtgtttcccagtttatgaattttttttacctgtatggggtgtcttctgattaaactggagagttaacttttacataattgtatataaaaatttattctcttttaataacaattctgttaagttataattcacataggatgcacctatctagagcatgcagctcagtgggttttggtacattcagagagttgtacaactgtccccgcaccccatctgataacattttcatcaccccagaaagaaatgctatccccgtcttagcagtcagtccccatctaccccactcccttaaccctaagcagccactcatctactctccgtctctctagatttgcctattctggacatttcatataatggaatcatacagtaataatagggtctttttgtatctggcttctttgacttagcatgttttcaaggttcatccattttataacatgtattaatatgtcatgatttttatcaccagataacattccactgtaatgaattgcccacattgtgtttgctcatttatcaaccgatggacatttaggttgttcccaggttttttgctgttgtgaataacgctgctgtggatattcacgtgcaagttgtatgtggacgtatgtttttacctttctagggagcttatctagctgtggagtggctgagtcatatggcagctctatgtttacatttctgagaaactgccaggctgtggacccacccttcacggtctcaccagccatgtctgagggttccagtgtcaccacatcctcatcagcacttgtgatgatgcgtctttttttctgcacccatctcatagatggagtggtttgcatttcccttacggctaatgacgttgaacgtatgttcctgtgctttttggtcatttgtgtctcttttttagagaaccgtctgctcagatttttgttcatgtttagtgggtttatgtggcttttattgttgtatattctagatacgagtcctttatcagacacgtgacttgcagtcattgtcatccttctctgggttgtcttttcactttcttgatggtgtcctttggagcacggacattgtttttttaatccactctgacattctctgtcttttgattggtgtgttgagaccattcacatttaaagtccttgctggcgttgttggatcagtatctaccgtgtttgtaacttttctgtttgttacatttgttctccgcacccctgcccctccccaaccccactcctttctgccttctctggttttcattgagccttttagataattccattttgtctccttgcttaatgtgtcgattatacttctcttaaaatttttttagtggtttccttaaagattacaatacagttcatacttaactgatttaagtccaccttgaagtaataccgtgcggcatcacgtgtagttcaggtgccttagatcattaccaatgtccccctcacggccccatctcttaggacaccattgtcttccttcagttagcgcttcctctgttcttgtttaagaaatccttcctaccccacagtcagaaagatctcctctagtgctagtcagtgtctcagaaggcaacaggtggcccctctgtcctcttctaatagccctcatcccgccagctcagagccagagtggagcctcagccgttcctgggtgtgtccgcacactctgctctggagctggggaatgacctcaggaggggctgagctgcactggacgtaccatcagatggtcctgtttccatgagcagaacaagacgtgctgtttccacccagctcaggacctgtgcgtctcagtagcacatcagggctgtagaatcagtgcgggtttagggcctgtgtttagtagccagtgggaggtcagcgtgtgtccctgtccccagcacacagccgcctggcaacaagtggccatgcgagtctggggaacgtgtgaggacaggctgaggacaggctcaccacacacgctgattgcccctcgcagggccctttcttaaagggtcccagcctccccgtcattggtctggacactggatgatgttgcaaatccccactatggttctgctcagcagacccagtaggtcccagcttctgtgtgtcaagcggcatctgatcaggcttgccctctttttcatcttggagcctctccccaggtcctgcgagtcaagtacactgagtagcctctgtccccttgcttaggtgatcactctggtatgcccgccgctggcccctactacccaggatcccgcagttcccgtggagagtgggaacctggtgctgtgggagcatcccttgtcaccggcgggatagagcggacagcctccatggacttctttaggaggacgctgaccctcccccaggcattttcctaaccccttggtgaggagaccagctccaggcctccccagggagtataggccaggtggcttaacagggtgtcacgcagtagatccctccagcctcccatttccctgcattcccagcagaccagcagcagctacatttgggaccttgttagaaatgaaaatccttggaccccaccacagcctgctcgatcacagactccgggagagggcccaacaatctggctttaataaaccgtctggggctggagaaccacagctctgcaggatgtcccggaggtccagcatactgacctcatcagcgattggtttttattaattctagacttggattagccaatcttgtagactatacacacccctcgatgttcaaggttcacattaaatgaccaaattgtgagggaaccaccttgtccacacgtgtgggtacatatgacctacttgcatttcgtcccgcttggagcccacctcccaggctcctgcccccacacagtggacatctccttctgacgcagttcctgtgccttggggtctgccttgttttatgggcccaggtggcgcaggatgtgggtgagtctgtggagaaagggcaccagcttgcaaggcagcagccccaggagcagcctgggaaggctttgtgcagaggaggcctgtttcctcctacgtgttgggagagttgtctctgcagatggtgggtgagagttcgctgccaaaaccactgtcttccctgccctgcggacacttcttcctcaccttcctaaaactgtaagagacctggagccgttgagcatcaatgactctttgactcaggaatcttaaaaaatcacaccctggggctaccatgggggccttctggttctccttgtgtattactagttgaatgtttatagctttcaatttctttttccccttctatatgctctctaaggacataggaagaatctacctgacctcacagctttggtaggcactgttattgccacaccctcttctcccagtgggcaccccacaccccaactccccggcacgttgttcagtgggactgccagtatcatgtataatcatgaatgctgtggattatccttattcacacacacagactcacaccctcacacccagaaaggcaactatcccagtgctcccagaatagatgaacaaccgaatcccagattcccttcgtgaggatttatttgaagaccactttcagtaacaattactttatcagtggaggtctcagcaggaaagatacggcacatagtagagcactttgaggaaggtcactagaccggttcccaaggcatgggcggagttcagagaaaccaccaggaactggtagcagcagaattgttgcaacgcttggccccaaaggaagaggggagggaatgttgatggcacctggaaggagaggttgtattgacaagtctccttggtagagcagtgatattcggggagaaacacggccagccagaagttaccctgtagaagggggcagaggagaaaacaagccaattcgaccctcctcccaacctgcctctctcgtctctcccattttctgtttccaaaaccgacccacagtcagagggcaaaggagccaaccagaaggcccctgtgtgtgatttttaagattcctgagtcaaagagtcattgatgctcaacggctccaggtctcttacagttttaggaaggtgaggaagaagtgtccgcagggcagggaagacagtggttttggcagcgaactctcacccaccatctgcagagacaactctcccaacacggaggaggaaacggccctcctctgcacaaagccttcccaggctgctcctggggctgctgccttgcaagctggtgacctttctccacagacttgggcccccatagccatgtgcctggggctgaaagcacggtagaggaaaccggaaagtggatttagagggacaaacagaagatatccaacccactctcagacgtcctcctacaagttttagttttacttctcacacttaagtatttaatctagctcaaattggttttgtgtttgatgtgaagtagggattttattttatttttttctcatatgaataaccaccttttcccagcatcatcagtggattagttcctcctttcaacactgatattctatcagtaaatcaagttctgtatttgcatacagattgtctcccttttctgttccacgagttaaacttgtctgtctctgacccagtgcctcacagacttcagtactgtatcttcataataaggcttgatatgtggtggggcaagtcttattctttttcaggagttttaggctattcttggccctttgttgtttcatattaactttgaatcaacttgacaagttccacaaaacaaaagctgttgggattttgactgaaattttatttaatatatacatctatctatctaatgtatctttatgatatgggaccttcctatccatgagcatggtatctctttatttaggtctcctttaagtattagtaaagtttgtaaattcttatatacacaacttacacatctctgataaaggcataggtaccttaagtgtctaacagttgttgctagtatatagacgtgcagttgattttttagattggtctcacatctagccacctttcaataaagtcccttatttcttccaataatttgtctattttttatgtaaaccataggaaaccatagatttgatatggttatctatgtagatagtcatatcatctgtgaataattgtagttttgtctctccctaatcaatctttaagctaattatttatttatcatggctgttgttgactagaactttcagtataatgatgaataaaagcattgattttgggcagtcttatcttgttcttgattttaaagggagtgctttcagggtttccacattaagattgatatttgctgtttgttttttgtaaatgcctttttaacaggttaagaaagcttccttcttgttttaatttgctaagagtttttaatcatatgggttttgaattttatctaatgcttttcctgtatcttctttattctgctactgtaaaaattacagttattgactttctaatgctaaaatacccttgcatttttggaataaactcaccatggtcatggcagactatctttcttcctcgttgctgaatttggctttctaatattttagttaggagttttgcttctatattctgggtaaagtggacctagagtttccctttcttatactgttcttgtctgtttttaggattaaagtattctggcctgataaatttttactttttctgttctctggaagagcttgtttaagactgggatgatctataccttgaaattttggtacagcttacctgtgaaactgtctaggcctgttctgtgtgagagagatgggtgtttaagcactgtttcagtttctttagtggaaagtttgacaagtcctgtatttgttttttagttagtggtttcataaattacaattttctaggaattttttaatgtggtctgtgttttcagaattatgagtgtaacggcattggtagtgtttccttattgtttttaaacctctgcttgatctgcggttacatcctttttccacttatcatgttatttattcgtttgcgccttaatttttttctttatcagtggtgccatgggtttggctatattgccagatttttaaagaactgcatttggccttttaaattctattgtaaatttgttttctacttttacagagttctggtcctaattgtattaccttcttctcatttttttttcttttaactttttagtttgatgcttaatcccatgaattttcagcatttctcttaccacgaacacctcaggttacacacatctttcccggggtcatgtccacagttcccatgagttgtcctaaatagtattttcattatcattccattctaagtatttttttatcccaattatgatgttttcttttaccatgagttatataaacatgtgtttgtgaatttccaaatgtgtgacatgtttagtctttctttgccctgttgacctccagcttaattgcattacagccaaagactatgctttcttggaaatcagttcttagacatttggggggtgtgcttgaagtcctggtactgggctcagtctttgaaaacgttgtgtgtctctagagagaaatgttattctctgttgttgggcgtggagttctaagtctgctggattacacctcttgacagagtggctcagaccctttccactgccattggctttttgtctaggtgaccctctgctacccctgtcccttatggcccctggaatcagggagcttatgtaggaggagcaggtgtttgggctggccctggagggtgaggaagatttggcttgatggaggtaggcagggggcctgggtagaggggacagcataatactggtgaaggaaggccagggaatggtgtggcatctcgaaagagggccagagggcaggaaaaggctggggcagggaccagaggccctgggaaagacccctctttagaagaggggcaggagagagtcttctgaggggagatgagagagagcccacagagaggaggacacggaggggtggggttgggtaggcccaggccatcgtggggggtcttcctgggcaggagagggacctgtgtgacggttcataggggcatagtggtggccatgtggctgtgtggggaggaggccctcagttcagtgtggggcctgggatagtgggtggcaaacatcagatggaatttcacagaacctaacgcacatctctctccctcgaggtgaatttttctttacagacctgtgaatctaagagatgatgtaacgcctgaactcattttataacatcagaagtttgcgacttaaaaatgtttcagaaggtgggggcgtgggctgtctagggttctaaggagaacgtggttgaaacagctgcctaaagggactgagggtgttggaggacccggtggcaggcgcatggatggaggaccaggaaccaccaaggtcaccatgggtgggaggcatcagggtgagggaggggtgttggtgaggggcccagctggagctgtgttcatagttgctgggatggaggggacagggcaggattcagggtgtcagcagagtcagttacctgggaggcgtggcacaatggtgatggaggagggggagcccaatgatagtgcagtgaggaatggtgggggggacgggaatggtggcagctggtggtgtggacttagggtggggggacgggaacggtggcagcgggtggtgtggacttagggtggggggacgggaatggtggcagcaggtgatgtggacttagggagaggagacgcggagcaagccgggagaactgggtgggcctggatttgtcctttcctggtaggattactgtggccacagaatttattgtgcaaccaggatgtttctaggaagtaaaagggagagcctggacacttacagctgggcaacaggatggaggaagccagcacacacatgattccctgtgcaggcacgtaggggctttcagctaagccaagggtgtgtgaggaagcaccaaaggtgcagaggagtttctcccttgttttggcttcaaaatagatgtttgtatataatagggattcccaagggctcagtgggcggagctagcagtgaggctgggagaggagaggtggcctggagagggtttctcttctgtccggaagcctttctcccttggctgagagaagctacacacacgccacttctctctgaacacgtggctcgtgaaccacagtcctacagctgtcagtagtaaaatccaggcccatccagcatgcttgcgggatgtcggggtggttaaatgaaatggaaggcagtttgttttttccaagtgagatggatgtgaaggaattaggtagaagctgacagaggtatacccaaaactgctaaatttagcctggattcaagaaagaggttagagaggtggcattgtgagtaattagacgcgtcgcagagagcgtgaatgattgacagagtttgtgtctgtggttgccgctggggagaaacagagcagagtgggagtcttcggaaggagcgaggagccaatctgctgggtatgtggagcctttgggaccgtcagtcgcgcttcgggtgctggggtctgtttgcgctggagaagatacacatggtgaaagggagagtgaggcacagtccctggagacagacgatggtctgtaaatggtgagcaaacaacagtcaggagccttgctggagtctgtaccaagggccctcctaagaagccgggtcctgtgggggtccagtgactgtgtacagcccgggggtccagtgactgtgtatagcccgggccacattgcccagctcgggtctctacggcatttgggtttatgcctcagctcaaagccttgcggaaacccctttcaacatgtgcgctgtctgctgcagagactcaaacccactggggcaaagcgaacacacagcactggagttgggtttcacgtccctatcaccacgacctgtgcccaccaacctagaaatagttgggtgaacttgctggttgtttgctgagatagtgcacatggcagtcacataggtctttactgtgtcttgcctgatagcccagcatgagtagaacagccatggagacctctgagagagcaggacgaatgtgtctgaccatgttgttgcaagccacctaaaacgtggctggacccagctccacctctggagggacgtaccacgggcaaccatctgtgagggtattgcagacaccagatgtcagcgctggtagggggtaagcaaacatcagatggaatgtgagcataagagatgacataaggccagaatgtgttttacaaaatcagaagttttggacttaaaaaatgtttcagtctggaattggacagatagcgcaggctcattttatggataagaaataagttagtttcaagaaaatggattgccagacacgaatggtattgcacacccagaggggtggccagggctgcctgtgtgtgggctgtccccggcacagctcctcggctcccctctgccctgcaccctgtactgttcaccttggccctgtatggctccgtctaggtgggattatcttccccacaggggccactgataaagaagcactctatatatttttaagaattgaaatcaaagggcaaatgggatttctctaactttgcaactagctttattgcaatgcacttccccccacaaagggagctgcatccttgttcttttctttaagaaatactatgaaaaaacccagctgaccagcctgcgccctgggaggctggggctgctctctgtgtgccaggccgtgagccgagcattccatatgcatcacgcctcatttatccccctagaaaccttgggcaaggaaatgctgctaatcccaatgcatggaaagggaagctgaagagaaatttaggaacttgctcagagatccttttcacttaaacagaggagttgggattcagatctgggtagtccttggctccaaggcccaagacctcaactgctgagttgagatttttatttatttatttatttttatttatttatttatttttgagatggaatctcactctgttgctcaggctggagtgcggtggcacgatcttggctcactgcaacctccgcctcctggttcaagtgattctcctgcctcagcctcccaagtagctgggattacaggtgtgcaccaccacacccagctaattttttatatttttggtagagacggggtttcaccatgttggccaggctagtctcgaaatcccgaccccaggtgatctgcttggcctcccaaagtgctgggattacaggcatgagccactgtgcccagcccaagctgagatcttgatactccctctggagtgtccttggtcatgcaaggcaaggcctggggtcccttcattgctacctccttgcctccctttgaccctcaccttgtgtattccccctttctctccccggctccatcttgcctcgaaagacgagtagagaagatgttccctccactgctaggactccagcttctaagaatgtgggtccctgtttttatccaggggtgcatctggcagattgccgttccttgttatgccctctgagagcccggtaggcaaagcggtttcctatgtgcctccttcatcttgctgtgtcatgctcgctcctgtcagcctctcccctggatccaggccctgggcccatgtgggcccttctgggtccctcatgtctaaaatacctggctcgagcagctgcccagatatttgttgagggaaggaatgagggaatggacagacgcctctggagacctgcagtggcttgagaaaacaaggacaagggttccagacagaagaggaaggaacggttggagcagcccaggagtcagggtgggcgtcactattgataaacgcacagacggtgactgcacagagtctcgtcactgtgggtgggtcttcaccaagtccctgttgataagctgctgttacgtgaatcagcacgtggaggggaccatccgtccttccatccctggagtaggatgatctgtcttctcttaccctccttccaagcaattacttctcatctgtaaattagtgctgctgaagttttactttgagtatgcaagttctgttgaaatcatttattggcaaatattccataagccacagatgttagtgcaaatgggatggagagaaaaggcaatgtagtgcctccccgatagagtagaaactgtggccagcaagggtgcagagatgggctgggacctggtcccctgacttcttagcatacagcttgccggagaaatcccaaatgccatttttaaagagccatatgaaaattgcacaaagtctatttttagtttacaagccaagatatgctttgcaaccgggaaaggatgtccctcagttgtattttggtgaagtcatgacagctgcctcatcagtagcttcttcatttttaattaccagcgtggggttgagtcacagaagcagaatgacagtgcatgtttctctgtgcctggttttaattggtgtgattgagttggggcattgatgcagctggatgaaagctttctgtatcttcatgcactgggagctgccgacctcagcagggcaagctgtcacaaggccagcagcataggagcttggtcactgtgccacctggtcagcaggcctttgaagccatcatttgggataggctccaggataaaaggaagctgagcttgcatggtgtttggctgacactctcaccacccatgactgtcagtcccggtcaggtgactctggccgtccctgagatgattgccacctccttcctgtgtccttgttccctttaagggaaaccacacaatagagaggggccaaggatgggaagcgctttccggagctaagagctgttaataataacagctgggcagcactgccgtgcttggctgtgccttggggtcggctatgccttctccctctcaggcctccagatgctgctggtacactggagccatagtcccagcatcctgagtgacacaagagaggtgggaaaggtggggacagaatgcagaggagagttttttgtttgtttgtttgtttgctgtggtcaaatacacataatagaaaatatatcatcttacctgtttgtaagtgtatagtttggggcatttagtattttcacgttgttatgcaaccatcaccactgtccatctccagaacttttttattttctcagactgaaactctgtacccttttatttatttatttattcattcattcattcattcattcattcattcattttttgagatggagtctcactctgttgcccaggctggactgcagtggtgtgatcttggctcactgcaacctccgcctcctgggttcaagcgattctcctgcctcagcctcccaaatagctgggattacaggtgcacgccaccatacccggctaatttttgtatttttggtagaggcggggtttcacgctgttggccaggctggtctctaactcctgacctcatgtgatctgtccacctgcctcggcctcccaaagtgctggaattacaggcagaagccactgtgcctggcctgaaactctgtaccctttacacaccaactccccactcctccctcccccacagcccctggcaaccacattctgtctctatgaatttggccattccaggtaccgcatacagggagaatcgttcagtattcgtccttagtgcctggctcatttcactgagcacagcgtcctccaggctcatctgtgttgtagcatgcatcagagtttcctccctttttcaggctgagccatattccatcgtgtgtccctgccaggttttgtcgatccactcaaccagccacagacacctgggttgctcccaccccttggcttttgtggaaaatgctgctgtgaacacgggtatgcagatatttgttcagaaccccgttttcacatcttcgggtacaggaggtatatatttttaagtgaaaatttgaagattaatttttctagaattccttttgatttcccttgggataacttgctctcaagtgatggtgttttaggtattaaaatgtgaatttccaacatgtctttcataaagacaaaatcttatttttaaaaaccttgtagcctcctccaacatgacctcccttggccaagtagccatgagctgcagcccagcactgacccttctttctggggagtccaggagggggcctggcaggagccagacgggctccccctgactgccttgggtgctcagtgtagtttgttctctgatccatgatgtaagcagcgtgcccaggtgtgctgtgcacagcctttggtgctcaaggtcacagacacagtccactcttcacgagcagagctgccctatgctgagagtagacctggactcgtaccggagcctctctcccctggcaaattctctagatgagactttcttgaggataaggcaccccctacttctcgcatactcagaaagaaaaaagtaaacagtgggcctcctcaagttgggaaagtctcaaccaaatgtctcgatccccactttccaggcgacaggctgcctgtagcctgcaggcatgtgttaggcaggctacacagtggtggtaacatgtacaatgagttgccattattaaaaactcgggagagcgcatgtcggatccaaatgctggcttctctggaagagttcaggagatctcgcagttctgggttcctggagcctccgcaggctcacctcctccctgacatggggtcccaggctgggccctgtgggcatcgggggtacctcacccaactagagaggccaaacatggcacagggaagttagcgagcagcagggagatgtggctcaaatccattcccactaacacatcagctgcacaggggcagcctgcggggagcaggggcgtgtgctctgcctgggggtgaggtatgggccctgggcacatggggcagggccaggcctcaagcagcctccctaccccagaggtcacctgcccttgaaatacacctcattttctgtctcttttacaaaataattcctggatcccacgggccctcctttgatgggaggaaggaatggggcagctctgagaagcagtctgtcgccgcttctcagcatggggttagagaaagagttttgtcttcagtttagaccatacattctttaagctttatttgggaaaggggctaaaaggtctggttaccttgttttattacaattaaaaatttcttttacaattttttgaaacaatcacaaacttacagaaaaattgaatgcacagggcaaagctcaactgacccagcgcagagaacctggtgaccccggccccgccagccccagtgctccagtgtgtcctttgcataaacaaggactgtgtctgcagagccgtgcagcacagccatggacaccggggaattccaccggtctttatcagttgtaagggcccctaatgtagtaacatgttccatctgtgctctgtgggtaaccaatctgccatgtcctgtgtcttcactttccctgagtgggcagcctggttatctgcctggactgacatctggagtagcctgttcccacccgtagccccacgggctcgattccacgttcccccatgtgagcgccctcctcaccttctgagttgcagcagtgccttgttctgggccaccccggatcttcccaccccacacacaccatgttcttccccatatgatgactttagactggaatttttcaggaaaaagaagagttttacagcttatcttaaaattaaaacaaaacaaaacaaaaatgaatactcaagaggcattggatttaggaatccggtaaaacaactaattccagacagccgtaaagaaacctgcaaccaggaaatgatttaaaatggagatcttcaaagtcaggattgtagttttttcaggtagctttttgtagaccttgaaaatataggccgagaccacatgtagaaattaaacgttctcatccgaagccggaccatttggtttggcgacttaagggaagagaaaaatgaagtttgctaagtaagaattaatgatttctcaggaatttttaggatgttgaacagcttaattgcatagtttgggtggatatgtgttgaagaaagtaattttaggagactgggaaattgtgcaatcatcttaacttgggtcaggattgtaattattgcaataacagaatgttgctatgtgtatatgtgactgaaatgggaagcagtttttaaaaaatgctttaagaaataacaacaaaatgtccattctctctctctctttctggacttccttaattataaataccaggtaatccagtgctggctaaatataggtccagtggtcatctatatttataacgtttttttcaggcggaagtcactagagcaatacagaattaatttggtgtgtaggtttttatagagtctaattagttgtgtttttcttaagcaaaccaaccgggatcaataacattatataactgaactcggacgaccatgacttttagacatagactcttcccagaaagccaaggccctcggcagatgccggccctgaagacagacaagcggctccggaagcaggcacgctgcagctgcggagcggacggggtttggaacatctgtttccagccaagggcaggctttgggagtgataaagtacagtttttttttgcaaagtcagaagcctcatctgcagtccattcatcactgaggccttgaattgagacattctgtggctgcttatcagctgttcccgtgtggaagggtttggctgggctggcctggggaggtggggtggggattttgcagacttaccaaagtatgcgcttagccgacccacccccaccaacaacgcagcctgctcgagggctacgaactgcacctgtgtctgcagtcacgtccattggagagctgagtgggcgggtggacctttggaactatttgatgtcatttggggtagattcggcgtgcttctcggtgactttgctgcaaattaaacatgtaaagtagattgggctttcctcctccattcctcaggatcttcaaaaaacatttagtcttttctggcagagtgaacccgagctggcagcgcccactgagattttgtttgaagccagctacattcacatttaaagaaacgacatgatgggggaggccctttctgtaaaccccaagccaggcctttcccctcgtgagggttcctacccctcccttgtgtggccctgcaagccgcttctgcttgtccacacctgcgcccgagagttcttctcatggctggtgcgtgccatgaatgaagggcactggccagtggaagggagtgcccggccaggccttgcctgcctcaagtcctcagaccagagaggccagtgggggtcttgcccagaccatacagccgggaggtggtctgcctggctccatagcctcctcccgacctcacagctgtcctgggacggggactgagagagagctcaaagacaggacagcagagcccgggccagaaggcactgggggcatgctcaccccacctctggatgcggggcctcactggacagctggacacagatgggatggggggagacctgtgtatcctcccaatgtcatttggagacagaagtctgttcatttcatcaggcagatttcaagctcctctgtgttccagacacagccaggccctgagaattgacagacaacatagctcctgcccttgaaggcttatggtggagggagggaggacaaagggtgtcatagccatgtctgggcatacagggcctgggaggcctgagagggcttcctggagtcagtgacagccgaggggatggttaaaagcagagtaggagttgaggggacttgagcgagcacaggggtgtgaaacggtgtgtgagggcagggccccttacactggatgacagagggcagtgtgggcagggccaggcctgtggctggagaggggtcctggctggtcgtgtattctccgagacaaggaggagtcagggtgggagtgtcagtgcggtggtacgggagagactaagaggccagcgagggtccaagcagaggggtggggctgcctgcactagggctggtgcgatgaggggagcgggtttgggagccattaagagccccctttgggaaggtttggtggtggcttttaccaagacaaggaacgcctcaggaggagaggtttggggtgcaggatggcgagggtgcagtgttgttgatgctgctctggcgtggtggaagttatgtgctgacctaggggtcctgccaggagccagtggataaagatggtgcagatccggcccagcccctggaggactcagccattatggggccacgtgcttgggacccccttaggcgggagaggctccccagaggagatgatgctgagctgagcctggaaggacccaggattggttggcaggaaatgaagaaacagccttctgggcctgtcttctcggtatctcatgcagttcctggatacagctcagcttctcccgcagaggatttcagaacccacctccccagtggctgttcagacctctggaaccagaacgtccatctggggccaagcccccacccacatggggttgctcaagctactcaggtgaagctgacatgtacgaaggtggcgagccatagatctggagttctgagttagggcaacccagcagtggccccaggaggctcactcggatgtgagaactgtgggaaaaccaaggacctacctggtatgtttcagagtcatttgtttatgaaccttacataaacacacacacctggatatgtatatacacgtgtatatgcacagatacacacacacgcctgaatacatatgcagttggctgtctttatccacgggttccacatctacacattcaaccaacctcaggtcaaaaacatgaaaaaaaaatgtatggtggatgtagaaactattttcttgtcatttttccttaaacaatatggtataacaactatttccacagcatttacattgtattaggtattataagtagtctaaagatgatttaaagtattggaggatgtgtgtaggttgtatgcaaatatgatgccattttatatcagggacttgagcatctgtggattttggcatctgcagggtggcctggaaccagccccccacggatgccaaggcatgactgtatacatatatatacatctgtatacaaacacttgcacatccatatacatatgcacacacacacaccggcatacgtatatacacgtgtatacaacactcacacattctatacatccacacatatgcacacacactcgtatacagacataatggaataatatgtacctgaaacataatataggcctcccatgatttccttattgaaatgaaggaaagtgcacacatgctgagggtactggttctctgggaaagaacctgccgcaaaggacaaggaccaaggtgcctgaaattccccatggtaactaacaatcttaaccatgccgagaggcagaaggttcaacggtgaagaatcctgactgttcattgactaaatgaatcttgaacagtttcactgctctgtgcctcagtttccccatcagtcagatgaggatggtcataacatctactccctacagttgttatgaaaatgaagcttattaattcatctgaactccaagcttgctgcctggaatggggcatgtgcccagcaagcgtcagctgttgtaatgagccaggggcactcggtaatagtgaggatccctggctgggggacaggtgaaggagggggaattgctgttccccactaactctgtacccttttgtaccttccatgttttgtatcatgtgcacatattacctatatttttttaaatgtcagagcatcttgttaaagaggattacactacattaaactctcttcactgtgagttctttgatctcattccttccagtgttctggtcaagaacatttagcaaggtttgtaatgatgttctaatgatgttatcagtttgatcaagtaatgcatataatcgcctatcaacgttgagtaaagaaacatgagcaccctgtattcagcaaattgtttattttcttgaatggtgcatgagacgggctctaattaattcattgtgaagataccacgggcaccaaagagaacaagaacgtatttaaatttcatgttatgacattacaaagacaatgccttgtggactagcagtcagattcattgatgaagagcagatggaggtcaggggaggacacggggctgagcaggactgggacgcagcctgggatggtggaggcagcgcctcccttctataatcgagggaaggaggaggaggctgccagggccctccgatagcggcagtccgtggaagccaccgctcctgattctaaaggcgggctgctcaggcaccggctggagaagcggtgcgtagtcgatgagctgtgagcacgggagcagagccagcgcctggtgtggacaccgtccgaggccacagccaagcagcagccacccaggacgtccaggctgctgagcagggaggaacacctgccatcagggcaaatgccacataaaaaaagaacctcactttacctggaagattatttggaattttgtctttaggccgcccccttcctgagtccaccgctgtccatttgaccctgaagaggtcctaaaagtgtggcagtcatcttaaaccctactcgtgtatctgtatgtcatttagtatcaaattttgtcacctgcttgtctgtgagcagaatggggaggctgctggtttaggaactgggagccccacagtgtgacatagtcttaacctccctgggcctcagtatactcatctgtgaaatggggacatctctgtgggtccttgtcacaccctaatctgtgagtcagggccagagggcagccaggtgtccttcatgttcaaccaggccagtggccacatccccacaggtgaccctgcgtgagcctgggggcctcacagcctggcatcctgtcccccttccccatgaaggcacccagagatgtgaaggaacagcctccctcactggggaggggcagaacctcctcgtacctggggtggaccctgctgtggtaggtcagatgagaagcctagaagggcttaggtgggtggggaggacgagagacagcaatggctgtatcataaacgcagcatcatccgggccgacgagactttcaatgggcctgtgttcctgggcagctgctcctgcctcctgctgtgtcacctttgattctctcactggttttgcccgtgatgaaaacctcacactcctgacctggtgcctgatgttgcaaagggagggcagagggcaggaccacatgagtcagacagaaggacggggcctcttggagcatctgacaaggtttatggaaaaagcacgtctcagagactcaatgagatgctgaaggtctaggcttgcagccgcacctgtgtttgagtcactccgtgtatggaccgccacttcccagccctagagaacccttgcttgacatcagagactttggtgaactcccctgatactctcagcagcaaatgctgtacatcacaggctggcagccttttctgtttcagagttcacatatgaactctttgatcctcgtgggctctagggtctctgttgcaaccactcagctctgctattgtagtaggaaggcagccatgaacagtagggaaagggtgggtgtggctatgttccaagaaaatttatcaaaaaacggtaggtggatatatacccaaaagaattgaaagcagggacacgagcagatatttgtacacagcagcattattcccagcagccaagcagtgggagtaatccacgtgtccataaatagatgaatgaataaacaaaatgtgagatgtgcagataacggaagattagtcagccttaaaaaggaaggaaattctgacacatggtccaacactgatgaaacatgagcacattatgctgaatgacataagccagtcacagaggacgaatgtgtgattccagcttcttctgcagctggctttgcaagggcagccttggctggtgtccccttctcccctgcagtgggagcgtccctccccggccccccagctctcatgctaggccggacataagtgtccaaacagatggagttctggccgctgctgcctccagaggtggttggcctggtcagcattctggggactgtctgtgcctttcctggatcgttcgtggagaacagttgacatcagcccagacccaggggcctttgcaaaggacagtcatggcggccccggggcagggggctggatggctttgggactggcctttgaggggaaaggtggcttccccaagcctggcttagctggtcaaaggccaggtgctgccctgaatggcttccaggcccccctgtcatgagcctgctaagggtcagcactgctgcaattagtctctttgccagcaagttttattcaactcttcgttcctccatgtccctgactgggaattgactcgaatgcccagagttaaaagaccaaaagttacgtaacgtctcccagggatgatggcagcttatgagcaaacatgttgattaaacactgcggcaagttgagactcggtgattgcctccgtagctaaataacagctctagtgcgggtgaggaggagccttttgacacgtgtggcagttaactttgttgaagaagtgagcaaggtgacttatctgtaggaagaaaaataaaagtgcttgtgagcaaaatagggcagaaataatgaggtttatgatggcagaaaaatgtgagaatcagaattgcggaaaaccgtgtatcgagcacttactacctgcctgctgggtctctgctagctctttcacacgtaaatatcgcgttcaaatttcggagcaacccttcagggtggtggttattagtctcataaggaaactgagagagggtaagcccaggtcacccagagggaagggtcacattagatgcagacctggatttggccaaaagctaaagcatcccagacccagagaagggagtggaggagcccgagagagaatcccagctcccaggaccaccagcatttgctgaatgcccactaggttctagacactcagctaggctctatataggtgattcccattgattcctcatgactgtcttcgtatttgatgttctgtggttgtaagcaacagaaacacactggagcaagctgaagtagaaaagggaactctttatttcgaggacaaagtggtgtctcctaaacccacgaacaggagacagcaaggctgccagggttgccggaaaggagaactgaagggaagcaaaggggctgggaggctctctcttgcactcctgccttatcttcttgtgtaaagatatgaaaatggccacagcatccaagtccctccaggtctccacctgggccagtcaactctattgaggtcagactatagcagactaaatggctatgaatgaggtggaggcagccaaggagttgtgagtcgggtaggctttagtcctacttaacttttaaaggtaagtacctttatccccattttacacataaggaattgagattcccatgagtcaaatgtccttgtccaaggtcacatggctaatcttggtggaggggtaggaagggtttggaccaaatcgatctgactcaaaacccatgtttgtaatcatcatatagaactgctgtagaggaccattagtcttaaatttaccctttaatcaagctagaaaagaaaccaggatggtttagcctgagaagatcaacctgagggtctgtatgatatccagtccatcttgattttaaaatcctttttggaggatggtgatcaactagcccttctctacagccaagaagcaggcctccgataacaatgtccccatgctcgagcccggacagacgtgaggacaagctggtgctacagcgagggccagcccttcttgaaggccaggggctggggcacagggctgctgttggttccatccggtcctcaagctgaaatctgtcctgacaaactgcccctggcagaaaattgggacacctcggaggtttagatgttctcatctgaccctttcacaatccccaagcagatggatccatgtgttttctttggctgtcctgttgcactggagagtgagtgttcattcttcgatatttcagtttacccatggggtggagaggatggggtttgtttataaatgaatgttttggtgtagacctgacttgacaccaacttagctacttcagggattcttggccctaaacgaacattcatttctgtctaaaaaacttggccatgatagtccaaactttaaatgatgttaatttaccgtgagatgtgatggagtatgtggtccatgggaaatatgacttagtgttatttatctaaaaatgagtgtctgaatccaccttcacgtttataaacactgcacacatgccagagatatgaggagcagggtgatggagggtgtgtttcctctgggagaatgagcccctcagataagggggagattcttgtggggtggaagattttggaagctgttcgtgagactattaattgatggcattctgcttcttgtcttgcagattggaaacctggaagattactaccatttttatcacagcaaaacctttaaaagatcaaccttgagtagcagaggccctcacaccttcctcagaatggacccccaggtacagagtgtccggatgctttcctaagggctggagggtttgggtctgtggtcttaaaaatggcggagtctggattttaatgtgattctggatagacatgagttttccatattcactttaaatacagcaagacaggtgtagctacgaatcagaccatctgaactaaatcatgtgagtgaggatctctcagcattttaaaatcaacaaaacacaatactcacaggagatacatatatgaatcttacccatgaaacaaaaactctaagcaattcaagcaagtattttaataatgaaattagagatcaggcaggtggatgtttttgtggttgtcataacatgtatgttaatggttactatgaatttgaaaactgaggcagtaactatgactttttttcctcaaagattcacatgatcttcaggattaaaacaaatgcgatttgaaaggaggctaacattttaaattttaacataacccgtatttattgggtggttaattatacttcctttctgcatagatttgaaattaatatttgagaaagatcaatcaacagttatgtgtcaagattaaaaatttaagatggccaagtgagcctccagtgagttcattcatttggcaggtatttttggaataccttccatgtggctggctctgtccatagcagggcccgtggagctggcggcagggctgacagaaaacgaagcaggaaatagaaaaatatgtgatatgtcacagggcgatgagtgctgagaaggaaaatgaagttcacgtgagaagcagtagcagccccagcaaggaacggaggtcattggtaaatcatagttttaggtcacagaaatcatcttctcttaaaagttaacgtatatactagatgtttgtttgggccccctggctggtgcacaatattatttcagctatttccagaaaatacttagagtaaagtttttatggaaaaatgggttcttggtgttgccccaacccacctgcttcaatgacaatcagggctctttttgtattgactgagcagggatctgttggagagacgcgttatctctgggctctgtacctgaattatccttctctggggcatcgcatggtgagggttttgatttgaagcatatgaggaagtggtccccatggagctcacccatggacctgggctgtgaaaagacagacttgtcttgaatatatttctggattggttttataggtgggtggatggatggatgaatggatggatagatagatacggataagtcgaacgagatagatatgaaacattgtgctaattccattattccttcatagcaagggaaggagttaagtgtttactaagggatggctgtgcttgggcactttacatgcaccgtctcaccccatcacatgggggtgagattacgtctacttgtgcttacaccatggaacatgaaggaatgtttttcaaaggggccagtatatttaatcctctaggaaaaaagccagattgtagttgctccttcccaaagagtggggcacttggggaagggtggatcagtagaaaactgagcagcagggagcctctgtacagggtgcataggctgatcccggaggaggcgtgagttctgtgcggttgagagaccgtcatctgtcatcttggaggaaattctaagctaggaaagaggtcgacgcagcatccctccacactttcactttaagcaagcacttgatctgccgtgtgaagaaacatcctcattcttcaactgaagtcttttgagttgttgaattgccaccacgcggatagttacaatgaaagcaagctgtttgcatgcaggaagcccatctcataagcatgctctgagaagagacggggaccgtggatttcttggtcttctttccatgaggccttccaagaattaataaagcagattcttaatggttagaactaaggcagagtcgaaataggagacttaatctgtgttttgactacatcctctgttgttggtgactatattttaaaacttttaaaggtactcaggtcgactgctcatcccttccttccaaaaatattaatggtgcacctgctgagtgcaggaccctgtgcctgagtaatgcagagctgcccagcaggtctctgtgttgctgagttctcggtgaagatggggatgggagacctgtgcatgagcaaggcaggctgaggcagcagagacagactctgtggggggcttgagggccaccataccctggacctgcctcctctctgcagcacctgagctgcttgattgacccattttaggtgtgttaaaagtcctatattcagtttgggtctgagggcaaagcattcccaggcattagttgtctcctcgaagtcagcagaaggaaggatagagacttcctaggcaaaggctaacgtagcagttaaattttttcaaataaaaatctccttctcacagagcttcttaataagctcctggcaaggcttctatcaatgcatcctgccagtaaagaagaaaggaagaaaggtaaacagcctgggcatcccaggccttcctggaacgttcctaggattggctgattgtttctcatagttctaattaaattgttagccccagggaaagcacacagacatctgaaccgattatgaattcagaatcgcaactgaaatacctctgtttaaatttgtctagctttaatgcaaaccaaatcaattagctgtcagtctgactaatatttactccacccagtcattacaattaaacacttggtgaaattagctgttttatggaagtatttagtgttatcttttattgcagtgcatcagaacgtttccctacgttggcaaagcatttttatgataccttcacatctggagagttgtgtaattaatattattaacaaaaggaaaagatgatttaatattattcagagacttcggaatgcgaggctgccattgtgttcaaatgaccaaactggaaatgaatgttatggggcttaggataaagttccatcaaatgcagacggtatcttattttaattagttccagtccctattgtataggagtgctttgataagtgatggaatgtacagtccaccccatgtcacataaaagcagatagaatgtacatttgggaaagcaaaacaaaactcaagggggtgtcagcagcaggactctgttaagcacgtgtgtgcacgcacacttattaggcatcttcttcgcactgatcctgtaccggaatggtacagtcattttccttgcattcttaattacctttacttgatgtttttcttaccgtctttgaaaagggccattttgctcagattgctttgttactcagccctgtccttggaggaacagcccaagtgttcgcagtgtgcagttatcggtcgctgggtttttccaaggcttgtcatttaagcaaactgaaagcatttgtttttaacttgttcttttgccaaaagtctggagaagggtggatattacagaagcgtcgaccaatcactgaaagggctcacaaatttttttaaaattacttgttctgattatgttccaagctggcttatagttagtcgttgctgcctgtgtcttccagaccttacattttagcatgatgacttgggttcagctcttttccttccctacagatctcagccagattggtgatggaaatggaaggataaagatgttcagagggagccttggtggctccttctagggccgtaggaggcttgggttcaatgcttcatttcagtgctttaaagcttagaagttgcaaaatgattgcaaggaccagaggaggcattctgttttgtaggatgggactttgcccccggagtttaatcaaagctcgggtttccttccagcagtgatgcaatgttgaagcagatctttccattaaccacagatggaattttatctaacagttttgtgtgctagagcaattcaaagtgcaaacaaacagaaagttcctgacaagagcacatagacagtaagtgaccacattggtctcaggggttgatgaactgtgtcatgggctgagggcagggccaggcagctgcccagggcccagaggatttgcccacgtggggacggtggactgctcccccatgagggtgatcgaatgacagtgacaagttggctgttcacattttcagcaccacccagctggttctagtggcatggctgctaggaattggtaaaaagtttgaatgtgtaaatttaccttaaaagacagcattttattctttcacgacatgctctgcccttccgcttagatatctcaaagacaatccaaagtcagtatgtcccaaacccagctcactgtctctgaccctagtctgtctcagagggaagcgctcatccgcattccactgcagtgccagcggcctctccttcccccctacacttgttccacctcccgtacaacctggccctgccatgtcctgtgtctcctgccctaggcccagctcctgtcatctcttgcctgcaccactgcactgccctccttgctggcctcatgtgggcatccttgccccggccagtcacctcccatgctcctgagggatcctctgaaatacggccaccactggcctttaagatcctcctcgggtgactttcgctctttttccctctgcagagcttttgcacagacggctccccaccttcccctgctgttgctctcttccccaccttcccctctgggctccaatatccctgccaccaggaagcctgctcagaggctgcggacttggcctgctcttctagcagtcgtatgtttgtattctagatctggccctagagtaggagcacacagcagtgtttgttgggaacgatgactagttcagtttgtttgggatctgtcagggacagacagagtcggcaggggagctgcaggtggttcctgggggacctggatcgtcaggcttgggagggcgttcagtgttccagaaccagaggagaggcgatgggaaggcggactgacgctgctgtgcggatgcctcgggagagaggaacttggagttcaaagcatgcaagcccatctcttgccaatgcaacaggaggttatcgagggtcaaggccacatatcatttgcttttactcccttacaagtccagcagcaacccagagaacagtagacaatgcttcctgaagcatatctcaagttccagagatgtgactcctataagcaagttgtgtgtaacataagcaacttctttctatgtaaatactttagaagtaaattctgacccaccttggctaaattatggaaaaatcctaaatatagttttcagttgacaaagctgtatcctgtattgctgaagctaaaataacagaggtacagacagtgactgcatgtcagacacgttgagcagtgttggacctcatagtttgttagtctgcgggggcagttgtaacaaagtcccacaggatgcggggacttcaaccgcagaaccgtattgtctcacacttaggaaggttggaagactgagattacggcgttggcagggttggtttcttctgaggtctcttgatcctcacgtggttgtccctctctgcgagtggctctgtcctaatctcctcttctcatgggacactggccagattggattagggtcccccgcatcatgacctcatattaacgtaactacctctttaaggcccttatctcccattacagtcacgttctgagctaccccgggttaagatttcaacataagaatttaggggttcacaggtcagcccctaacaataggtgaagctgggctccagctgcctcttctgttgtcagtgagtggaggtgggtggcgggcggtggggagaggggcaccttctgtcccctttcagcaaaataagaactaacttacaaatgagtagctttactttcccaaagagctttcacacgcactgtcccatttccgtcatcggcagagcgaggacttccctctctcatgactgttaagcaggggtcttctggcacctgtagtttaacttcaatggaaagaattcaagaaatggtctctacgctgttgcagttatggctgcaggggaggcagtggggagggagctgggctcgcagctgcctggatgacacgggaggtggtggtgggggtggctttctaggctgagttagaatgtcctttattttctggttcctcctccccctcctctactgcccgggcttactcactgggttcccgctgtgtgtttgccatggcagcctggggtttcccggccccacccctaggtgagccagtgctgcgccggaggtgggcctgggcatctcgccatgatgggctctcacgaaaccatgtaatcgtctctcacttgtcacgatggccctcttgccctgctggaagatgacagccacaggaccaatccctcactcggagaacttggatctgctttctgcctctgtctagcttggttcagtggttcttagccatttgggggaatcacaggcccctttgaaaagctgttggaagttgtggggcctctcgctctccagaggaaaaaagacatcatgctcatgccggcaccattttgcatacagttctggggtttctgggactcgagcctgtccttccactccttgagggactgtgggatccagggcaagatggctccagtgtgctgcatgaatcgtcgcctgtcagtgagagaagggccacgttgcacattatgcagtgacgggcacttgtcggggagtgggatttttctttctttaaattcaccagtcagctttctcactgagctctttagctggttggatgttggcccagcgaggtgctcagagcagtcaaggttgatgggaatcaagatctaagcgccacagactgttgagtgcacaagctctgagagagggaccggtcccagcccctgctttacagtgtggagggagaggcccaggcagggtgcccacctcccacacagagagaataacaggcttattttctacggtgccctgattgttctctcctggaggaggctttggagcttggtggctcctgggtgccgaggtatggcctccgactccctcccttgatatgccctggtggacagtcaggtctggcttgcagtccccttgttctttcacagttacagaataaagtaaccttcgctttgatgaaaccagggagaaaagagaaaagaaagagctggccgagctgtctcccttgcgttggctacaactgtgcagaacctgtgtgaacctggtgtccgcagccctgccggtgcgtacttcaaagaacctcagcagcttgactcccttgatgctgtgtgggacccctggaccgctgggggagggtgcctgtgtatgcccttcgtggccttccctccatctcagagcaaagactgaagcccctctccttttaggactctccagctcccaagaacttctaggggccttcctgagccacagcagggcccctctgaataggcacaggcttgaagttagggcagaaggacatggtggctttgggtggacgtgcaagtgggagggatttcatgctctctttggtgacactggctcatgagtgaaagtttcaaaacaccctcccctgtcgcttgtcacacctgggaatgatatgtcagcaagcttctggcccacctgtggcccacagggaagaagacagggccaaggctgcccatggctgctcgctgaaaggatgcttggacaaggatcacaactcggtggcatggacagcctgcagcatggcaagccatttactggaacgcgggcagggccccctcctgggtctctgcttgtttatgttaccctttaggaacatccttagattttacctcgtcttatcaacagagggacagtcaacggatgcctcattttaacttggcttctcgagaaggaagctggaggaagcacacactacaaaagaaagtgttgctgcgcacctgtcttgagaagacgatgaagccttcttcatgattagaactccctgccccagagcgtagcttatctataactgtgctgcatgtttagcaggaaacatacatttggaaaatagagaaaaggataaaaaggtcagagtgaagttctatcttcaaagtatgacgttaaagaaatcctggcactttctacagatttgcagagaaagacggtttctgtttgggctagaagtggcatttggcaaaccttgcctttgccccaaatcacttatagttgattttccacaagaaaagtcaacagatgtcatctagcagtcatttagacctaatcacattttctttctttctttctttctttctttttttttttgagacagagtctcactctgtcacccaggctggagtgcaatggtgcaatctctgctcactgcaacctgtgagggttgcttccattcgatgggagggctggagttttagtcgcttggtttggggctggtgacacacctctgacctccacagagtgtccaggtggctcctggtttcaccccgagggggcattgaaggcagagctttgcatcccagctggggatgggagggggaggcactttggtcctggccgggaaccaggtatgttcatgctgatcttcccagaacctagcgccagacacacaggaagactcagtgcatttttgttgagtgagccacagaataagtgaccccaggatgcctgctctctggagacactggggaaggtgaacctggaaaatggctttctctttgtggtgggtaggaggtgggatccgggatccccttgtgctgtcctggagctgggtgagaagcaagggagtgactggaacccagaggaagggacacagtgccgggagaatcagcctctgccaccgcgctgtctgcctgcatcccgtctccacggagaagcccccacgcctggtcagtcatctgttgtacagtgttcggttccattggcctgagagcacctcacttgccgtcagagacttacaatgagcaggtgtgttagcagagagagggctgcccctgcgaccacgacagagagagagccccaaactgtgctgcgggccgcaggctatcacagtccccctcagaactgtgtgccagtgttgtggggttttgcccagagcccagcaaggaccaagggccgggatgcccaggctcttccatcctgctgaggaaccctcttatgacttctggctctacgctttcccacatctcccagctgattagtggggtgtcacccacttgggcttggaagggcagagtgtgcctcctcctctgactggaagtgtggtctggtgggcacagcaattggaaggggctggatgttgttagaacagagagttcagggccccttagcacaaacagggctcagcctggcaggagggcgggacatccctgggagctttgggctgtgcgggatctacataccactgtattttgtaatagcgtgctgaacagattatgaaatattgtttgcggcatcttagaccaggtaaaaagccttctagttcaggcagtaatatatggggacattgcaaaatgccatcagccggtgttaggaacaaaatatctcattttatagttttattttctgtggaagtatctgtcagcggccattataaattatctaggacttggtgctgaggattttttaagtgtgtgacgtgaaactggttttgagccctttgcagtgtttctaaggcgtctggtctgctggtgttttatagacgaattacatcggggtgggacaggctgggatgcctctcttccggcattttgccctgtacaccaaggatgtcttggaggccatccccagccctaaatttgagctgtgtatgcaggtgctccgctctccttgctcagggtgatgtggggaggccaaggctcagggaggaggaagagaaatcttgtccctttgctcttggggactgttactccctgcccactcagcctcaggtagctctgttctagcttccagcacgaccctgggtcgccagccttgggtcaccttggggccccgcccccttctcttgttcctcccctgcctctagctgcctcctccaggcagcctgccctgtttggaactcacatcatcctctgattggtgggatcccctgaatgtagtgcagactcctcgagagcacggccctggcgcccatccttatcccacccatgtcaggccccagagccaggctgaaccccagctttgagcattattcaatcaggtggagctgccgtggtaagaccaaagaaaacattcccactcagggtccaagaagtctttaccccaagatccttttaaaatgaaaaagtttttccagcttgaaaagaatgtgtacacgggatgataagagcaggagtgctccaggcactggtctgagggctttatatgtgttgtttcttatattaaccctgtggcaacccatgactgtccccactgtgtgggtggacaccaccctgaggccatggatgtccactgtcagctccaagtcacacagctggtgagcacggggctgggttttattgcaggtggcctggtgccttgatccttggtcttaaatatcagtgatacagccttgtgaacttttttccttgatcgtgaaaacaaatcatgctgattgaaagacatttatgacatcctgaaagtaattgtaaaattttaaattagcaataatgtcaccacccaggaactgatgctactactattttgctgtattcctttctagatttttctctgtgcatgttttggtaccatattgctggtggctgccaaatattccaatatatggcttaccatatttacttatgtccttactgtaaagcaaattccaataccagttaaccaaacactttcttcattcactgctttcccatgtgtgtatttcctttttcttcaggacaaggatcaccagataatttatcggcaatttcacaaggctggcttccttccttctctccctctctccctcccttccttcttgtctttctgtctctctctctctctgtctttttttttttttgacagggtcttgctgtgttgcccagactggagtgcagtggcaccaatcatggctcactgcagccttgacttcccaggctcaagcaatcctttcacctcagtctcctgaggagctgggactacaggcatgcgccatcatgcccagctagatttttttttttttttttttggagaggtggggtttcaccatgttgcccaggctggtctcaaactcctgggctcaggcgatcttcctgcctcggcctcccaacgtgctgggatgacaggcgtgagcactttctttcttttagtacaacgacttcaaaatctatcagagtggtgttatttcttcctctgtatacacaaacaacttctcatctttcaaatgtagtcactttgaagtgaaaatgtccccaggaacttaccatctaaaatatctgctatgacacagatattcacgcacaaggaaggctgtagcacctgcaaagaggctacataaaatcaagaaatcatttctaatataaacagtaattgcatttcttctggtaggtgaaatggctccagcaacaggaagtgaaacgaagggtgaagagacaggtgcgaagtgacccgcaggccctttacttcaacgaccccatttggtccaacatgtggtacctggtgagtaggacaggacctctgtctgccccaggacacttgcactgccaggtctctgaaatgggttaatttccctcaacaaagctaaattcaaacaacatctccagacagacacacttcaccttgagggtgtaaaaccactaccgcaaggctgtgcagtaccggctttcctgtggattttttctgaaactttgtgcagcacactctgggatgggggctctttgagaagggaagtgatttgatgcaggctgtatgactaaatggcaaagcccagcccatggacagagctcctgctgggaggcgatgccctgggaaaatatagattgcaggtgcagaaaaagcaagggagccgtctgcatgattctcgatccgagtgggaaagaggagctctgctatgtaaggcagggataggtgttccctccttttttacttgcaagcctaagcgcctccctgtggggtgtgcaccgagtgtcagttctgcatctggaatgtccatgtcggggggactttgtgtctttcgtgcttacagcattgtggcgacaagaacagtcgctgccggtcggaaatgaatgtccaggcagcgtggaagaggggctacacaggaaaaaacgtggtggtcaccatccttgatgatggcatagagagaaatcaccctgacctggccccaaattatgtaagtcaatcctcggaactgacatgcaaatatattcaactgtgctggtcattaagtaaatgcaagtttaaaaacagtaaggtcccgatctcccccagcccccattaagttaggcagtaaagaaaactatgctggaaagaattaggaagatgaatattctgctacttgctactgtcaggggcaagggttttgcagagggattcatccacatgcttgcacagtcacatacacttttaggaatggagcctaaagaactaagaaatgcatggagggggatcatcagcgtacagatagtagcaacacgaacagtgacagggtgacagtgtgaaaacacgggctctaggcccagagtgcctgggttcctatcctgggtctgcaaatgattagctctgagatcttgagtaagttacttaacttctctgtgcctcatctgtaaacattttaccgtctgtaaaatggttcataagagaacgactctctcacggagttattgtaaggactaaattagttaaatgtaaggacacaagcttggcatatcgtaaatatcatagatgcaagaaatactctaagggacttgggcacctaccggtgattaagtaaaccatattgtatccatctgacagatcgttatgcagcccttagaaatgaattttgcagactacgtgtcaacaacactggaaaccttttatcatatattttaaaaggagaatgtaaaattatgtgaatactgctgttacagtcatataaacaaaagcatacctattgaaaatataaaatgaaggaaatcctgacccacgtggaaacgtggataaaccttggacgttatgcgaagtgaaataagccagtcacaaaaggacaaatactgcctgattccacttacacgagtgactcggagtagccaaactcttagacaaaaaggtggagtgggggttgccagggcctgggagaggggagtggggagttagtgttgagtgggtgtggggttttgcaggttgaaagggttctggagatgggtagcagcgatggcctcaagcactgtgaattaatgccactgagccgcacactcgagaatggttaaggtcgtgtatttcccgtcacatatattttaccacgataaaaacgtatatgagattatagctatagtaagagaggagccccgcgtgtggtttctctatttgccaacggaacataaaatccatttcaaacagagctgtcacatgccatttctcctcactcaccacgattccatttcttaggattcctacgccagctacgacgtgaacggcaatgattatgacccatctccacgatatgatgccagcaatgaaaataagtacgtcacctcgcctcatctccccggcttctcttcccctccctgcagcgtcactattgaatgtgtgtgcgagggagctggagaggcggtggctgccggcgtatcttccctgcctgggcgcgaggcaggcttctccaggagtcacaggccatgccaggcacagcccttcaggcacggccagcttctgtggagtcagcctgttcctctggggtgtcaccgctgccgggcagctagaaatgggtgtttgacagacatcgttcctgtttccaactttcttgaaatattttaaaagagaaacccttaagtctaaccgtctccatgacctgctgtgtgaagacagcagtttggtctgtttgagcacacaggtcacgtgcctgagcttttgtgactctgtgaccttaggaatgaggtggaaggggcatgagtaatgctggatagacccaggttcagatcgcagctctcccacttactggctgcgtgcatgccgggtgagctggttgaaacttcatgtcttagtgtcttagaggctcgtccaggccagtgatgtcccctacctcacagggtcacaggaggggtcagtgagatgatgcatgaggaatgcacccagcagattcttccgaaatggtgggcgtttttgtgtcactgtcattttgcaagtggaggcagtggggtccggagagcccaggtgactttgcagtgtaaacggcagccctggggtcagtcctgggaattcatttgctgtctctttccttctccatcagcatgccccataccctgagctcttatcattcctctaaaaatatttagagggaaataataaaagctttttcttcctccccactgttgacaagactcttgctgaggggcgtctcccgattatagtcttttagtttgtggtcgctttgattctgagattcacaaacgggtgcgcaggcaatgctgtgcaggaagcctcggccactggagttccacacagcaggctgcagagctcccgcgagcctgcagcagcccagcctcatgcacgtcccaaggtgcccttcctgctgccagtgaggatgcctggggcaaaggaggaatgacccacataccacgcagtgacccttgaagggcaggattcaatcccatcccgagccatccattgagctctgtgaccccgggaacagccctggccttgaagctgtgtggcttccagggaaggacagatgactctcttccagagggctgctgcctggggcgatttttaaaggcagctttaaatttgaatcaatgattcccatcctctgtggactcttctcaaagatgtgctatttcaagttgctcctattttggcccccgctggaggaactgacccgacgtggcacatcagagaatggggtcattactgaggaaaacgcatttgtttttctggtcatttcttcatagtctcccagctgctgagtgtttaatttagagcgttcttcctcagctccagcttaaatggccttagaagcacaggaagggctgcctcagggtaagcatggtgttgtaggtgcataggggatgaggcaggtgacatcagcaccagactgttccttctttcatcctgccaggcagcaggtgtccctgctgccagccacaggagacacgaggccgaggtggcgcagcacccaccctacacagcagtggccatgtgccaattacacgtgctgggaggaggaaggtataggaccacgggcactggggcaggcaccttcctcccacatgggggtcaggggaggcatgctggaagaggtgaccatgcgtgagcacttgccacattcaggatgccaggaagggctgtacccaggctgacttggtgccttctcccagagtggggttggtgatgagaggggatgcaggaaatgggctttaatgacatctctgggcttcggacaactgactctcttgttgcattgaactgagccaggcactgaattcactgaaacttgctgggctgcgtcctcacttggttttttcctttgtttcagacacggcactcgttgtgcgggagaagttgctgcttcagcaaacaattcctactgcatcgtgggcatagcgtacaatgccaaaataggaggtaaggccgggcgtggcagcctgcgagccgaggggcctggggcaggggcagctgggagctccctgtccgctggtctcagcagcctcctgttttttggctttggccatgtcagcagacccctgggccagacgcagcagtgccgtctgtatcatggcccaggcagctgacccacagggattggggcctcaagacagaggaactgcttactgttttgcctgaaaagccattgcagttcccatcagaaaggtaccctctctcctctggtcctgctggcctggctgctgactcctagaagtctgcgttgattccccgctgcccatagccctcagtggctccgtcacttcccagacagagtgacagcttttacccgggaccagagctttccctgggttctgactcccactcaagcctgctggcccacttctcctgcccctgctctgaccttagaggacatttttcatagtgccccttagacacatctggtcttcccgattgatgcctgggcttgaaccattcccatccccgcctcccccgtctttccacttggctctgtccacctgtgccttatggcagcctcatgcctgctctgttctgtgaagtgctccctggatccagctgtcccccgtctcattcaccagggaatcagctcttcttggtccctttacggagcagcagccgcccctgccccgcgtgcgtctggtcttgccatttagcttctcacactgctcagtcaagctgcccttgctaggatgaggctttggagtaaagtattgaatgtcttcctattccccacgggagcccggcagtgtgacagctcagtcacccaagtgctctgaaggcccctctaggtgcatgtcactgacccgggaactgagcaagtgggggcagcagagaggagtgccagagggcctccagggactgcggcctcacccaggaggcctgtctgcttctcagtccgaaggtgctcctgctcactcaggtggctgcagtgggaaaccaccttcccgggggggcactgccatcctgccactgagccttggtgagggtgcctgcagccgctttctgccgttctgccaccgagccttggtgagggtggctgcagccactttctgccgttctgccaccgagccttggtgagggtggctgcagccgctttggctccacttatgagcagtaccaggcagggaggttgggccacggttccctggatcaccagtccttgggggaatttcttgtgtttcgaaaagagggtccttagcttttacttaattaggactctgcctgccttttcccgtggaaatcttgaaggtggcttggattttcattttatagcagaattaacccccaagggcgcgttctgcagaacaaatcaggagactctgtcaactggcctggctcctttgtggatagttcttgcaaactgagatatataagttctccctggagcctttgatgatgggtgcagagccctgagacgtctctccaggatctgtagaatcgggccaacctgggtgccagttccattcccaccactcactgtctgtgtgtccttgaacaacttacataacctctctgagccaaggtttctttacctgtggggtgaaatgaccaccaggcagctgcctccccagttttgttatgaggatgaagtcagataccatgtgtgaaaccatcggcttgggctaagtctgcaggggatagctgagctcctccttccctcttgctgagactctcagtgggagaataaaaaccatttgtgttgctttgagtgaggggtggaccccacctttggagttgcttgagccttgctcccccaagtccctagactttgagcatggcatcctctgggagccgttagaaatgcagaatccccaccccaggcctacggagtcagggtttgcattataacaagatcgcaggggatttgtctccacgtcacaatgtgagaagcgctggtttagaggactccctggggtctcacaggtaggtaacacctgcatcatggattgcggggaggagtcagtggaagtaacatgcataaagatcctcccagatgaggtgcacagtaaatacagcattaccgttagatagctctacactcatcgccaaactctttccctacgtttcccgagtcctgcaagtgaaggtgctccctccagatctggaaaatgtagggatagaatttggcatgtgtttaaaacaagaataatagcaatgcactgtgggtttataacgtatgaagcaatatatatatatatgtatataaacaacagcaggaatggtaacagtcatggtgaatggaaacgctctatcttagatttatacattatacagaaaatagtatactattaattccagatagactgggataagttaggatatgcattatagtctcttgagtgacaactaacaataaagacatgaaaaggaagagctctatggtcagctccagggacatcccagggaaattccctgttgtgtgccagcacacacagagagggagctgtgttagagcacctcacccagaggtgggcttggagggagaaccaggaggaagcgggttggctgcctgtgtggagaggctaaagctgtttgcagcagctttggagccagtggctatcactggatccttgggtcaaggccagcctcaaccccacacctaccttccagagaggtgtgagctccacctcatgtcctcgatctttatgtggcctgctcaccccagccccacgccgcagacgtaattgtctcctcagcactctcacgggtagtcaagtcctgccgtgtcaagctcagccacaccctcatgccctgctctcatggggtgcctgctctgccacccctggggctcctacctgcccctttaacttcaataggtggttctgtgccatcttccttgttggttccctccaaagacatgctgagctcctagaggcccagaactgtgaccctcatctctttcgtctctctgtcagcggcatatccagtattatacatgcagcatgtgctcaaccatattcaatgcgttaattaaaaaatatccctgttatcatgcatatcccaacttatcccagtctatctggaattaatagtgtactttctatataatgtgtaaatctaagattgtttccattcaccatcactgtcattgtttgtgctgttgtttttatagattctacttcacatgttataaacccacagtgcatttcttgttttaaacatgtagttgaccgcaaactacttatgacaagaaatacatttacctgcctgtgtaccattccactgactggtcttccttactttttctagcttcagatttccatctttccatttatcttcagcctgtcgccaggctctttggtatttattgaggttatctctcacctcttttggtatttgttgaggttcaggtatgctagtgaaaaattctctccaattttatctgaaagtggcttctcttcatttttcttaaaagaaattatgctgaacacgaccttctaactttttttttgtctttcaacactttaaaggtgttattctgttgtcttctggtatccattgtttccgacgatgagtcgattgttaattgccatccttattgttgttcccttttaagaaacgtgatttgttcctatggctcctttttttttttttgaagagatggggtcttgctctgtcacccaggttggagtgcagtggcataatcatagctcactgcagccttaaactcctggcctcaagtgatcctcccacccgagcctcccaagtatctgggactgcaggtgaacacaacctttcccagctaattaaaaaaaacacacacctttttccttgtaggatgagatactgctgtgttgcccaggctggactcaaactcctggcctcaagcgatcctcccacctcagcctcccaaagtgctgggattacaggcatgagccaccatggcccttccctgtagctgctttcataatgttatttttaaaaatatctgtgctttgcctgtggctctaacattcttttatgtagttttcttcgtattaattccatcttgggttttctgtgcttcttagtgggttattctttttaaagaaaatttggaaaaaaaattgtcaatatttcttcaaatttttttaagttccattttctttctactctctgtgggcacagttatagttgttagattgcttaatacgcctcacaggttactgaggcactgttcatttttttaacccttttttctctgcttcgaatggaatgatttttattgaacttcaagttaactaatccttccttttgttgtgttcagtctggtctttaaaaaaaatttcagggctgggcatggtggctcacacctgtaatctcagcagtttgggtggctgaggtgagtggatcacctgagatcaggagttcaagaccagactggccaacatgctaaaaccccgtctctactaaaaatacaaaaaatcagccaggtgtggtggcacatgcctgtaatcccagctactcaggaggctgaggcaagagaattggcttagacctgggaggcggaggttgcagtgagctgagatcataccactgcattccagcctgggtgacagagcaagactccatctcaaaaaaaaaaaaaaaaaattcagatatttacttttctgtcttatgatttccatttgactctttttttactgtttccgaatccctcatgtgtctccatctcttcagtcatgatatctatcttttattctagactctttaacatgtttgtaagaaatactttaaagtcttttgcacttaattccaacatctaggccattttaggagtatgtttataatgactgatttttctctttacagtgggtcatgtatttctctttctttgcatatgtctagtaattttttattgtatggtagatattgttacattgtagagactctggattctgttgtctttgaatatcattaagtttctttcttggccaggcgcggtggctcacgcctgtaatcccagcactgtgggaggctgaggcgggtggatcccgagatcaggagattgagaccatcctggctaacacagtgaaaccccatctctactaaaaatgcaaaaaattagccgggcgcggtggcgggcgcctgcagtcccagctacttgggaggctgaggcaggagaatggcgtgaacccgggaggcagagcttgcagtgagctgagatcgcgccaactgcactccagcctgggcgacagagcgagactccgtctcaaaaaaaaaaaaaaagtttcgttctagcagttggttaaatgtgagcttgtggagacctgattattcttttttttaatgtttgctatctttctgattttcgcatagccttagggaaaatccattagccctagcatatggtctttactcctagaccatgacccttttggtatttcagtggaaagcctgaaatgtttaaacccagacctctaacttagcaagtctgaaactccagatggactgccctgtagtgggcagcagctgaaatacctgctcagctcctccagcctctcagctgctgttttcctactggacttcttagtgggttgcccatgtatacttcagggttcagccaagtggttgtgaggagtttatatgttctcttctgtagatctctcctttctgaaatttctcctctcaatttccagcagctctgacagtcccaactctatcccctgactcctctggagaataagatgacattttactgtacttcagtatttgagttctagcctctctgcaccaaaagaaatggaaagttccctcaagaggaaaagtcatgtcaacttggagcatacccagtatggtttgtcaagaattgaaccccctgcctacctctgcccttttctggttgttcttcagtggtcttaaaaagttaattttttctaagtaaatattttttcagagtttataattattatctttaataagaagagttagtctgatataagcaactctgtcattgttgaacttaaaacttgtggtttatagttatcaattagattgtgtattagttatctattgctgagtggcagtcattctaaaaatgcagctgcttaaaacaacaaacacttgttttccagcacagatagtggctttgctgaatgtttctgattcagggtcactggtgaagttccagtcaagctgttggctgtgattgtagtctgaagacttgactgagtctggaggattcacttccaagatgggttacttatggggctgttggctggagtccctgattcctcactgtgtgtacctttccagagggttgcttgagtgtccccataacatggtagctggctttctttataacaagtgattcaagagaaaaagcaaaaccaaaccagcaatgtcttttatgacctcatctcagaagtcatgtaccatctcttcagccatactctgtgcattagaaatggatcactaagtttaacaatacactcaaggggaaagaaatttggtcgcaccttttgagtagaaaggtgtcaaaaaacctgtggacatagtttaaccaattttctttgtaaaactgcacattccttataaatgttgtcacataaaaataattaaatcaactgaaagaaacaggaactgtccaaattatatcttaagaaatagccaggcgtggtggctcatgcctgtaatcccagcactttgagaggcggaggtgagcagatcacctgaggtcaggagttcccgaacagcctgccaacatggtgaaaccctgtctctactaaaaatataaaaatcagctggatgtggtggtaggggcctgtagtcccagctacttgggaggctgaggcaggagaattgcttgaacctgtaaggtggaggtttcagtgagccaagatcgtgccactgcactccagcctgggcaacagagcgagactccatctcaaaaataataaaaaagaaacaaaactccttcaacccccagtttccctaggtgtgttgccttcaggtgcattagcacctaccctggggagaaattttacactgtcaggaatccacagaggcatgtgccatcttcattgtttccagagaggagagtggggtacccctgtgcggtcactggtccctgatgtctttcattttagagagactttaattttatattaagttgtcaagctgtacattgatgatttgtgcccccttttcatatataattttttaataaaaatctgtttaaagtttttatgggctgggcatagtggttcacacttgtaatcccagcactttgggggttgaggcaggaagaccttttgagcccagaaatttgagaccaacctggtcaacatagtgataccctgtctctacaaaaaattttgaaaaatttagccgggcatggtggcatgtgcttgtagtcccagctacttgggaggctgaggtgagaggaccacataagcctaggaggtcgaggccgcagtgagccatgattgcgtcattatactccagctgggtgacagagtgagaccctgtctcaaaaaaacaaagtaaagttcttatgatgtcacatttgttcatcttccttcatgactcttgagtttgggatcttgcccaagatagtaaacctgttttgtatttcctctaaaaacttagttttaggacaataattggtcttaaaatttttatggttttctctttcctgtttagctttttttttttttttttgagacagaatctcactctgtcacccaggctggagtgcagtagcatgatctcagctcactgcaacctccacctcctgggttcaagcaattctcctgcctcagcctcccgagtacctgggattacaggtgcccaccaccatgcctggctaatttttttgtattttttatgtaaagacggtgtttcactatgttggccaggctgatctcggactcctgacctcaggtgatccacctgcctcagctgcccaaagtactgggattacaggtgtgagccactacaaccagcctttctgttcagctttttgatccatatggaatttatttctgtgagtagtgtgaaagagagatccccccaaatcaatatttggtgattgccacacgtggccctcatcacatcctagatccccatatggacactgggtctgcccttacgtttccttagtcagttccttcataagccctaacaataccacgctttgaattattacagtcagtttaggagagttttggggttttgtttttgtttttttggtaactgatagggcaaattttctcttatggttccttttcaaaaattacttggctattcttgcacattttctctttcagatgaacttgagaatctgcttgtcaagttccattaaaaaaaaaaaagccctgttgggattttgattgggattgcttggaaattatagattaattgggggagaatgacatctttacaatattgagtcttcccacccaggagcatggtatgtttttatttattcaggtcttcttttacattgttttttaaagttttatcactttctccatatcgattttatacatttcttattagatatatatctagattttttaaaaatttgtatttctaattggtcattattgaaacggatataggaaagctattgatttttgtatgttgggttttgtttctggtcaccttattgatctctgtgggtgctgttgtttttccgttggattctcttggcttttctggagagatgttaaataatagctatctgtaaatataatggtggttttatctctttaatattaataactctctttttcttgccttatttgaatatgtagcagttcctgatgaatattgaatagtggtggtttataggttctgtttgatttctgacttatacaggaatacttctaattttatgccatttgtaaatgtcttccctgtagttaccctttatcaagttgagaaaattttattatattcctagatttctaagagatttaatcaggaatggatgttgaatatttaaaagtatctattgagattattatattgtttttcaactttattgtttaatctgtgtagtgtaataagttacattaatagatttcctaaactgggctaggcacagtggctcacgcctgtaatcccagcactttgggaggtcaaagtgggtggatcacctgatgtcgggagctcgagaccggcctggccaaaatgttgaaaccctgtttgtactaaaaatacaaaaattagctgggcatggtggcaggcacctgtaatcccagctactcgggaggctgaggcaggagaatcgcttgaacctgggagacaaaggctgcagtgagtcgagatgacaccactgcactgcagccctgtaagactttgcctcaaaaaaaaaaaaaaaaaaatcctaaattggaaactttttctttcatttttgaaataagttccatttgctcatgagtattgttgttttgatacatctgcattcaactgctgatgtcttcttatggttttacaacttcatttataaaatggatagaatcacagtttctgtgttttgtgatgtttctctctaacttgtttatcagagtcaggccagtctcgtagaaagagttaggaaactttcttttcctgtgctctgaaatagttaatatattgtggatagtgcctgatttctgaagtgttggtagagctgattaactagtctgattggatatggtgactttcaaaaggactagacctattcaggttttctgtttcttcttgaggagatttttgtaattaaatcttcctagaaaatcatcaatttttcaagattttcaaatatatgacataaattcaatatcatatgctcgtaatttaaaagtacatcctccatgtttatagttataattgtttctaatcttatttgtgacatctcctcttttttccttgattgatgaaaaatttctatttttaataaaataggttttttcacctcagtgtcatacaatatacccatgtaataaatttgcacatataacccctgaatctaaagtaaaagttaaaattataaaaaatagtgtacgtaaaaataaaaaaaaacaggcttttgcagagaactaggttttttttaattgagttcctttattttctgcatcataaatttctgcttttacttatttattaattccttcagcttttaaatttgttgttgctgtgttctaattccttgaatggaatgtgtatttagttctttattttcaggattttatgtgttctaataaataaataaataatcatacattctcctttcatcacctcttactagtttaattatatggtgcttttcttgctatatatttctgaataattgtacgtttcagcttagatttttctctttaacccaggagttatttagaagagatttataaaatttttcaactgcgtagattttctgatgctccttttgttgttaatttttaagtttcttatattgggttcacagaatgttctgtatattttctgccttttggaatttctggagaatatctttgtgtcctaatacacgttcagtttttgtgaatatgccaatgggtgtttgcattagtccgttttcacactgctgataaagacatacccaagactgggaacaaaaagaaatttaattgaacttatagttccacatggctggggaggcgtcagaatcatggtgggaggtgaaaggcacttcttaacatggcggtggcaagagaaaaatgaggaggaagcaaaagcagaaacccctgataaacccatcagatctcataagacttattcactatcacgagaatagcacaggatataatataatatagtagcttttccaggcacatggtacaagctgccagtggatctactattctggggtctggaggatggtggccctcttctcacaggtccactaggcagtaccccagtagggactctttgtgggggttctgaccccacaattcccttctgcactgccctagcagaggttcttcatgagggccccacccctgcagcaaagttctgcctgggcatccaggtgtttccctacagcttctgaaatctaggtggaggttcccaaacctcagttcttgacttctgtgcacctgcaggctcaacacacaagtggaagttgccaaagcttggggctcccaccctctgaagccacagcccaagctgtacgttggctcctttcagccacgactgacgtggctaggacacagtgcaccaagtccttaggctgcatacagtacgaggaccctgggcgtggcccatgaaaccactttttcctcctgggcctctgggcctctgatgggaggggctgctgtgaaggtctctgacatggcctggagacattttcccatggtcttggggattaatgttagattccttgttacttatgcagatttctgcagccggcttgaatttctcctcagaaaatgggattttcttttctactgcatcatcaggctgcagattttctgaacttttatgctctgcttcccttttaaaacagaatggctttaacagcacccaagtcaccttttaaatgctttgctacttagaaatttcttctgccagatactctaaatcatctttctcaagttcaaagttccacagatctctggggcaggggcaaaattctgccagtctctttgctaaaacataacaagagtcacctttgctccagttcccaatgagttcctcatctccatctgagaccacctgaccatggaccttactgttcatatcactatcagcatttttgtcaaagccattcaacaaatctctaggaggttccaaactttcccacattttcctgtcttcttctgagccctccaaactgttccagcctctgcctgttacccagttccaaagttgcttccacattttggggtatcttttcagcaatgcccactctatgggcaccaatttactgtattagtccattttcatgctgctgatgaagacattcccgagactgggaagaaaaagagatttaattggacttacagttccacgtggctgggaaggcctcagaatcatggtgggaggcgaaagccacttcttatatggtggtggcaagagaaaaatgaggaggaagcaaaagcagaaacccgtgataaacctgtcagatctcatgagacttactctctatcacaaaaatagcacaggaaagactggcacccatgattcaattacctccccctgagtccctcccacaacatgtgggaattctgggagattcaattctagttgagatttgggtggggacacagccaaaccatatcagtgtttgaagagtatttttattctatgctcattgagtaaaaaaaatctgtatcagattagggattgcaactggtagcccataagctgcctttggcctgcagacatgttttgtttgactcacacaagtgtatttttgaaaacttgagtaaacatttacaaatcacagtattttatgtaaaaatatggatttggggctttctatgaaagcttagaagctctggctgtgctgggccctcattccttaatggcaacagtcggctacgattgctcctaactcaaagggcagtctacccgtccccgggtggccttcacagacctggctgcttcagccatttaccctgcctgcctgatacctttaggcatcagcctctatcacctgtgtgttctatcaagttcattcagaagttctggagtctttcttactttttgtctacctgatctgtttctgagaaggaatgctggtttccatgatgattatggatgtgtcagtttctttccgttttcgctgtacacattttatagctatttacaaggtacattacaaggtataatgaatcttcatcaatataaaatcctctctatctcatttttgccctttaattgtactttggctgatataacacctgtactttgattgataaaagtagcacacttgcgaatttattttatcatccttcttctcatatattctttatttctaatgttggttttataagcagcatgtatctggatttatattttaacacaattgaagagtctctttaaagaaggactttgttatattcatacatgtgctgatttcagatatctttggatttatttctattgtatttgtttttatctattcatccatccatccatccatccatctgtccgtccatctgtctaccaatctgtctttacctgccttttgctggttagatgtagtttcttctcttttctttcattctaatgggttgaaatttttacattctaaatctgtttttctgttactctttaaacacagttattgggacttatgtttctctacagtgtttagcgctaatcagtacttaactctttcacctgagcaacataagaaacttaccatagctccactcctctgccatcttctgtctgtcgtcacctccttgaattgggataattcaaaaatttaactccatattatttttaacaagtttacatcatgcatcaacaattgtgtgagcttaagtataaagtctaattaatttctttggtcaccattgtttcttttttcttacatctttgtatgtgatttttttattttactagattttctcatctattaaattattcattctcttaaaagatattttgagtgcttgctataggtatgaatggttatatagatagtaaattttctgagtccttgaagtctaaaaatgtcattattttctccctacaaatttggctaggttttgactttaagttcaagataattttcactcataatttaaaaggtattaccccatggtctttggtattcagtgttgctgacaaggggcgtctctttgtctcaggtgaatttttttgctctgaagtctactttatctgatattaatatagctacttctactttcctttgattaatggttgtacagtatacgtttttccatccttttactttcaacttgcctatattgttatatttgaattgagtctcctgtagataacatatatttgggccattttttaaaatttatttttcttttataaaaatttttattaatttgaagagtacaatacagtagaaattgcctcttttttcttttattgataaatgacatttcacatatttaagaggtacctgtgaatgttttctacatgcatggaatgcagaatgatcaagtcaaggcatttggggtatccgtcatcttgggtgtttatcatgtctatgtgttggtaacatttcaagtcctctcttctacactgaaatatttaacatattgttgctaactgtagccccccggtctgctgtcaaacgtgggccatgtttttagattcacttgccaatctcttttagttactatatttagatggttaatatttaatgtaattattgatacattaggggttaagtctgccattttaacttctctattattttcctctgtatttagtttctctgttttttttttcctgccttcctgtgggttacttgaacactttttaaaatctcacttggtttataatgtttttgagtatgtcttcttgtatagcttttttagtggctacccttggtattacattatgcacatgtaacttctcacaatcaattttatgggtgttgtcactttaccagcgtgaggtacagaaaccttaccttcctttatatcccattattctctcccatttatatttgtaatatacatacatattaaacatacattcatttagaaccacatcagacagtgttgtaatttttgcttcaaccatcaaatgtaatttagaaaacttgaaagtaaacttggtgaatctgtaggtttatatctcttgccaaatttggagagcgtttagccattatttcttcgagaacttttccagcccccactactttttttcctcctcctcctcctcctcctcctcctcctcctcctcactcctcctccattattagagacagggtctcgctgtgttgctcaggctggagtgcagtggggcagtcatagctcactgtaacctcgaactcctgggcacaagcaatcctccggccttggcctcccaaagggctgggattacaggtgtgagccaccactcctggccctttttcctctcctcctgtccactctagtgacatgaagtttaggtctttgttatagtctcacaagtccctaatgctctgttcatatttttaaatttttttctttatgttgttcagattgggtaattttatatatatatatatatatataattttccagttcactctttcttctgtcctgtgggttctattactgagcccatcactgagctttttgattattgtatttccagttctaataattctacttggttcctctttatatcgtgtatttctttgctgagactttcagtttctttattgagactttctattttttcatttgttttaggcatatttgtaattgctcacctaggtgtttttttcatggcctctttaaaatctttattaatatacaactagtatatccttaaaaattaaaaataattttaaaaggtaaacctaaaaagaggaagaaaatgaataaaatgtctgtcagatggttccagcatccgtttcctccatgttggcatcggtgattgtctgtctttatgcatttgagatcttcctattcgttcttggaatgacatgtgatattcctttgaaacctgtacatttttgcattatgttatgaggctatacctgacttcagccttctgtttcagctggcttctctggccctgttgctgcagaggacaaggggtaccatttcattattgtcaggggtaggttgtccagggcccccattcagcctccgctgatacccaagcgtgggaagtctccttatcagtgctgagaaggggcagtggttcccactccctgtgtgcctcccatgaccccacagtgcaggtcccctcattactgtgagcagcagtgagcctcctgactctccaccaggcatcctgacacaactccaggggatggaggggacacgttgttactgctgggtgtggttggaagaccaggctcatggcatggtatctgctggcaccatgcaagtgggccccttttgaggttgctggaggtaaaagcgctgcttcctacctgctgtttcctgacatgccccagcagtgaggtcgggcacctcatttcgtcctcgcatgggtggaggtctaggctcgccactcaggctgtgctgccataggtcggggtggtaccacggttccttgctgtggtatttggcctacttattgtgtatggttttttccatttgttctattggccctgtctcgtcgggtccctctgttcttgttcatgttgctttttaattgggtgcccctctttcttgggatgggttttcctcaaacatgggctgcttcttggtcgtccacccctgcatgtgctcacagatccccatgtggctgtgggtggttgtctggtctgacggcaggggtctttctgtgatgtggagtggagggagctgttgcttgatagcatttcttctgagaagggtgcgaggcggactccccgctcccagggcatcgtcctggtgctctggccttaggaccctgtctcactgcaccagcctcaagatgactctgctgctgtccccactcagcctggaggctgagacctgccaccctagctccttactccgaggcctgtttggggctcctcctgtccttgcacgcccagcctggcaccttcctcagctctggaattgttccccactcagaagtcctcgcgccaggaccccgcctcctgctgctacctgatgccctctgcttcccgtctttcctcagtgcctcaagacagctcgtctgtgctgatcttgtttcccaaggctggttcagatttgttcgttctaagttttattcctagggatccaggccctggggagaggtaggctgcgtgctcagtcttcctcctgggttgggtctcttgagtcttttcactgtggtgcagatggtgacacctcttgccgattgctgttggttgccaagcacttgtagtcatctttgcatccagttcttagtgtgcctctgtgcgctggacatgatcatggccgtttcccaccaggggagactaacagagagatgaattgccacatctgggttcacacagctgccaagaggcagcgcagaggcttgagctcaggcctgttgccctgaagcctggattccacctttgcaatcatagccttctgatgctaggacatcgcggtgaccagatgagaacagctgccaccaagcccagtggccagaaacagaagcagaaggggaagccttcgcagtgtataactgtatacttcttgactgaattctgattccttccaagcatattttggcctcgcctcttcctcctggcctaaaaaggtatgataatgggaacagcacaggagggagcgagagagggcagcaggcatttcctagcccctcttcttattcatcctttctttgctctcttgctctgttcacctttttgtctttttaattttgacctggcacatagttctccttctctctctctctaatgctccttccctcccagcccttctgcttcagggtggcattggtggtggggggctccagacttggctgcctccactgccatcagctcacctccaaggtgagtgcaggctgagcttcatggcaagcccttcctgctggggcctgcagaattctaaaggccctggccaagcacagtggctcacacaaaatccctgcagtttgggaggccaaggcaggaggatcacttgaggccaggagtttgaaaccagcctcaacaacatagtgagaccctgtgtctacaaacaatttaaaaattagccaggcatggtggcttatgcctgtaatcccagccactcaggaggctgaggcaggaagatctcttaagcctagatgtttgaagctgcagtgagcaatgattgtggcactgcactccagcctgggcaacagagcaagactcaaactcaaaaaaacaaacaaacaaaaaagtgtgaaggcccctcccagaatgcaggctgaggatgtgatcccatccactgcaccaggtcctcctggcttcgtgccccatgcggcatcctttgagaaaagcttgctggggagccaggtgtgctggcttggccggagtggaacctgctctctcagggaggcttgcaatatgcaggggaggtgagtggagccctcacccctttaactttaccaggcttctaccctttagcaagttcctcacgtgtgctgatacttaaccagattcagacactttcctaaggcaggaggggtgtcatgagggacactgcattatggtacactttccctgcattttttttttttttttgagacggagtcttactctgtcgcccaggctggagtgcagtggcacgatctcggctcactgcaagctccgcctcccgggttcacgccattctcctgcctcagcctcccgagtagctgggactacaggcgcccgccaccgcgcccggctaattttctgcctttttagtagagacggggtttcactgtgttagccaggatggtctcgatctcctgacctcgtgatccgcccgcctcggccgcccaaagtgctgggattacaggcgtgagccactgcgcctggccttgtatttttaatagagacagggtttcaccatgttggccaggatggtctcgatctcctgacctcgtgatccgcccgcctcggccgcccaaagtgctgggattacaggcatgagcccccgcgctcagcctccctgcttttcagaagcatcgccagtccacagggcaggatccctgaggctggtctggagtaggctgcatttggggcctgcagcaagggcagctggagaccgcagggagccctcccacctgacaaacagaaaagctcccctgctccggcccccggatataggtgcatcttttcagaccatgtttgccctgtttctgggaaggaaaagtaaacggcagcgaccagattcctgttggtgtttttgctccatattttgattggggaactgaatcatgtttttcctttcataaacacgaaaatgttaagtacataacagctaaattaatccatgcccataaattggttaattatgttaattctgagtcacagaattcagtctcgttagtgtttccattaagcagtttaggcctgtgagcattttaagagaacagtttaagctgtagattaatcttcaaaggttcccagcgcattttcaactgcaagaggattttaaatgcactggggggcttggggggatttggtgaatgttaggagctgctgctgtcagggagcgggtgttccccacttcctcgtccctcacctcccccaacacatccaaggcccctgcctgctagatctgagcatcgccaggctaagcaggagccataggaaggaggagatgggcaagaactggcatagccccttctgccctgtgtctccctggtggccatgccctcctcaggccgccctgctgcagacacccgcagagaatgggtgaggctagctctcgaatgctgtgggctgcatagccctgggttcctgagagggctgctgaggggctttcttcctgggtgtacataagaaagaagcagagagacaggaagagagcacgctgagtcttagaaacaagctcctgggtggcctttgttcatggcggcatgaacgtctccttttcgccgtccgtgtccccttcagaggtccgttcaggatatgggtttgctttcttggcacgtgcgcctcctctagggttccttgccgtacttgcgtgtggtgcagatgtacgggtgctccatctggctcagaagcctgctgtcctgtcctgcatcccaagctgccggctctcactggcttcctgtgtgtgcctgggccatgcacttctgttctccagccctcattccctagcggggagaccgtgaaagggtcagcctcgatgtcaaacctctagaccatggctaaggcttttccaggttttgtattgttctttgaagaatcaacaggacccgattatcaaagagagacctgtttaaatatgtacaatcattttcggtattatttaggtttggcaaggccagcagatgaggagaccactgccatgcattgaaaaggtggtttgttccagttcccaagaggatgcgtcccagtaccgtatgtggggccacacagagaagcagcgggttctgtcaggaggcaggagagaggggaagacacgggccagaggccttgtggtggtttctgtgggaaggagtgggtgaggcagagaaggcaagttcagaatcagctaggctgaataatttcagcagactcaggggaataggggctgtccctagctgcctgacacctggccttgggtggttaggttaagggagtagtgacctggtgtgtgagagcccatgatggaggtggctggggtgtagactctggattggttggcttgcatgtgaaaagcacactcctgatgggtagtttactatcccgagaccctgggtagcgcctgaaggaacagtctccccagggtcagcaagccccagatgtcaaagcatcagatactgaaaatacaagaggaaggggagaagatggatgataccaaagttatcccagacgcagtaccagggccagggcctcaacttagcttttcattaatcttctcaactgccttggcagataaatattgtagaaaacatgatttagagaggctgagactatggcccaaggtcatgcagagccgacattccgctccaggactctctgaccccagctgtcttccccctaccatgagctgctctgtatcttgccaggggccatacccttgccacaccacactgccagcctcccacgctggtcacggcccttctcttggaggtcgctggctgagagagctgcgcacctgtgtccgtgacacagctgtggagatgggacgccagacacatggaccacagactggggaaccagtctcagttatcacgggacctgacctgggacagacctcatctcctggatccagggctgcatgcaggacatgcccataaggagcgtcgctggctacagctgtgtttccactgtagaaggaggtggagtggctccatcagggcatcaggaacagaacaggaagcaggaagagatttggcttggtgatcccccgcgcgtccccacacacttcatgtcacgatggcgaacgtaggtctgccttgacaactcggcagaccacagctccctggagctcctagaacaaggctgtcctgtgggggcatagttagcaatttgaaagccgtgtctattgtcttaggtgataatgagggttgacagaaaccttttaggattgtagcatttctaagtaactgttgaaaccttacttggcccggaatggctgctcatagaacagaatgtgctatagttttactgaaaaaaacaaaacaaaaacaaaacataattctctgtggacttactaaaataaacccagggctaatgagcaaaatgtgttggggaggcctatttgtcacactcaggaagcgacagtctaattttatttgctcctgttcattgcttctgcattgccattcattcgctgaaggcaaaatacattacttctcaataaacaaaagtgggcccagcgtgtcccgctccctgccttcctccagccgttatccccccgggcaggagggctgacttgtattgatgtgcatgtgtgcgtgtgtgtgtgtgggtgtgtgggcttgtgggtgtgttcttcccattgctcttaatgttgagcttcctagaaagttttcaggggaaatgctgtgtctcgtgctgactggggccggctgcatgttgataggttcaccttgccttatacaaacctgctatttggaaagtcgagatataaattagaagcaggcggccgggtacggtggttcatacctgtaatcccagcactttgggaggccgaggtgggcagatcacttgaggtcaggggtttgagaccagcctggccagcatggcgaagccccatctctactaaaaatataaaaattagccaggcgtggtggtgtgtgcctgtaatcccagctactccagtggctgaggcaggagaatcgctcgaacctgggaggcgaggttgcagtgagctgagatcacgccactgcactccagcctgggcgacagagggagactctgtctgaaaaaaaaaattagaagcaggggaaatggaggaaagacaggtcactacggaaaaaaagtggctttgtttttttttttagcttcactaagtgagttgtaaaatcattcatttcatcaagttctcccagggcatttaaaatattattgggtttaggagattttataggaatgcacgtattatttaaagcaaggcaaactggtgtgattccttcctggatggagcttctgtgggcagctgcaattgtcagtggggggattggttcccatagcaccccgagttcttccctcaaacacaaaggcaccaggttctccaaagcaaccatcttccttccactcaacactcctcccgcctcacacccacagactcgtccttagagtggactgggcaggcgggttcattgtgccacgctgtgctctgaacccagcatgcccaaaagcagtccgttagcaagctgaccatggggagttcattgccatcaatgccatcaaaacaatttgcccaaatcaaatttatacctgacattttatagtaaatgggcctttcttttctcattagagaaatcattactgtttttcttctccttggcatttccagagagccattcacatttaaagctcatgttggaacagcaggcttctactgaaaatatttaccttttctttgttggcaacttgtcagtgttggggaaaatagatgcttcattaagatctaagcgcgtgatgcttgctttcccacacatcagtcagtctttttccaagatgaaaagcatggtgagaggtgttgggaaatcattctggtcatatgtttttatgtatttttggatgtcttctggcatcccgttcttcttgttcaaaaataggcatttcaacacctataacttgtagagagaatcctagaacaggatcagcttcaccacttagagcatcagaattggtcttgacccccgggtggccagtgaggtctcctgccctggagatccatggctgaaagtaagggcaaagagaaccctgctgccatttatccagcagttccggggccagggcctcaacttagcttttcgttaatcttcttaactgccccggtagataaaaattgtaagaaacatgatttagagaggttgagaccatggcccaaggtcatgtggaagcgagattacaccccaggactctctgaccccactctcttcccctaccgtgagctgctctgtatcttgccggcggccacgatcttgccagcctcttgcactgggcctggccctgacccttctcttggaggttcctggctgagagagctggacacttgggcccagtgtccctgacacagccatggagatgggatggcaggcacatggaccacagatttgggaaagaccccacttcatgtccacccgacccctcctctccacccagaaaggacaaaatacagtgagctgatgccacagcccatgtgagctgggcctagaggtggctctgccctgcctataaaagggggaaaggaacttacaatagatgccagcaaacccagaaacccagagaaggttggcccctgttacgactcctttgatcttcacagggaggtgagctcttgctctattaaaattaagaacctctgtttgtctagagctaccataaacacagtgagaagaccaggcatacactgggagaagatttttataacctgcattaccaacaaaggattaattctcagtacaagcaaaattaaacaatgtatcacttaagcatatatacaattgtattaaactagtagtatttaaaaagcaatggcctgcgaggtgggcggatcacctgaagtcaggagttcaagaccagcctggccaacgtggtgaaaccccgtttctactaaaaagcacaaaaattagccgtgtgtggtggcgggcgcctgtaatcccagctacttggttggctgaggcaggagaatcacttgaacccgggaggcggaggttgcagtgagccgaaatggcgccactgtcctccaacctgggcaacagagcgagacgccatctcaaaataaataaataaataaataaataaaggcaatggcatgaataatccaaaaattctgatcattttcctctgagaagctgggggtgacagggaggacacagaagtagaggcccccagtgggtcacgttcttgttcttgcattgggctgcagggttcatgggtatccgtttttttattaggctttataactaacgtgtatgtgacatacaatcttttgtgcttatcaagtcatgtgtttttagaaaacaaaaagaaaaaccaatcagttattgttactacctccatttttttttctctctctttttttttaattattattatactttaagttttagggtacatgtgcacaatgtgcaggttagttacatatgtgtacatgtgccatgctggtgtgctgcacccattaactggtcatttagcattaggtatatctcctaatgctatccctcccccctccccccaccccacaacagtccccagagtgtgatgttccccttcctgtgtccatgtgttctcattgttcaattcccacctatgagtgagaacatgcggtgtttggttttttgtccttgcgatagtttactgagaatgatgatttccagtttcatccatgtccctacaaaggacatgaactcatcattttttatggctgcatagtattccatggcgtatatgtgccacactttcttaatccagtctatcattgttggacatttgggttggttccaagtctttgctattgtgaatagtgccacaataaacatatgtgtgcgtgtgtctttatagcagcatgatttatagtcctttgggtatatacccagtaatgggatggctgggtcaaatggtatttctagttctagatccctgaggaatcgccacactgtcttccacaatggttgaactagtttacagtcccaccaacagtgtaaaagtgttcctatttctccacatcctctccagcacctgttgtttcctgactttttaatgattgccattctaactggtgtgagatgatatctcattgtggttttgttttggatttctctgatgaccagtgatgatgagcattttttcatgtgtcttttggctgcataaatgtcttcttttgagaagtgtctgttcatatcctttgcccactttttgatggggttgtttgtttctttcttgtaaatttgtttgagttcattgtagattctggatactagccctttgtcagatgagtaggttgcgaaaattttctcccgttttgtaggttgcctgttcactctgatggtagtttcttttgctgtgcagaagctctttagtttaattagatcccatttgtcaattttgtcttttggtgccattgcttttggtgttttagacatgaagtccttgcccatgcctatgtcctgaatggtaatgcctaggttttcttctagggtttttctggttttaggtctaacgtttaagtctttaatccatcttgaattaacttttgtataaggtctaaggaagggatccagtttcagctttctacatatggctagccagttttcccagcaccatttattaaatagggaatcctttccccattgcttgtttttctcaggtttgtcaaagatcagatagttgtagatatgtggcattatttctgagggctctgttctgttccattgatctatatctctgttttggtaccagtaccatgctgttttggttactgtagccttgtcgtatagtttgaagtcaggtagcgtgatgcctccagctttgttcttttggcttaggattgacttggcaatgtgggctcttttttggttccatatgaactttaaagtagttttttccaattctgtgaagaaagtcattggtagcttgatggggatggcattgaatctataaattaccttgggcagtatggccattttcacaatattgatactacctccatttttacagatgggaaaactgaggctcagtggggtcaaactagcagcaaacacacacgttgaatgcttactgtgtgccagaccctttacacggatcatccgatttcatttgtttgacatccctctacatatgataagtgtcatcattgcagtgtgcagaagactgaggctcagcgagacgggagaacttcagagtcactacctggtcacagttgatggtgaaggcaaggtcttcacctgtggcatgccccacgtccctcctgctggctccgaggctcactgtgagtgacagctccactctgtggacctccccttgggagcaggcgtcgaggcatctaagtccacttgccttgtgccatctcagtgcctggacactggtggctaccctgggccgtcctgcagccagctcgctgaggtaggaaagagaggaagggaaacaggtggagtgagaagagaagatagataacactgaagttacatttattcctactgctcatagtaggctttcaagctatgaagagatggctcttcccgtgacttcagccccatcctccatcgctgcccacgcccacgtggctgacactgccgaatgtctctagcactgttgttgaacttctgatgtctcctatgcctcaaccttgctattgccttggtgtaaatttctctgacattgattttgaatacaattccaggcttttggagcagaagtttccagttaagcttggtgtcccacctaagtgttaaggtcaacatgccgagccctagagtggtcctccctctcccaccaccaactatcctacctggcctcccaagaactgcctttggtgactcttgtattctctgtcttgcttcatgcctgggaaatttcagggcatatattaaggggaaaaccttagggaaacctgaaccttcaaaactgggtagaatgaatggatggaatggaagaatttactgcagcgaaatcatcttcaaattccttttaggttggaagcttcttaccctggcaagtgaagaagtacatttggttatatgtttataatccatgtgctactgggtgaaagatgataggacaagaacatttgaaatgtatgtgttagggatctctgcccagcagtttccatcaaaagagcacacccatgattatcgtacaaatggatgggacagcaggattctactcacgtaaaatgtttgtccctgagcacctagggagggtgtcacctccagggtctccttcctgttgctcttctgcatgagtcctgcaccacctcttttaacctcagggaaaacttcactattttgttttttaaagtcagtcatatttaaagttgctgcttttgagtatgcactacgtgttgatgtagattctggaatgtagaacaaacaggcgcagactagtatgggtaaggtggggaacccctacttcagaaggtgaaccccagaaggaagctgcctgggccaggggtgtgtgcatgatggcagggagctgcagccactaagccttggaagagtctttaatggcacagggaaatgccctgtataaagctcagtgggggaaaaaaaggatttagaaagaaagtatatgccagaggcaaagaaaaagactagaagaaaataaccagccaggtgcagtggtgtgcacctgtgatcctagctactcgggaggctgaggtgggatgattgcttgagcccaggtgtttgaggctgcagtgagctatgatctgtgtcactgcattccagcctgggtgacagagtgagaccccatctgtaaagcaaaaaaagaaaagaaaatagccaaaatattattggttatttctctttttcccaaagtttgggcaagagcatatactattcttacaatcagaagaagtcctcttttccattacgtcttaaatagctctaagatttagaattcgtcttgatgaaggcatggtcatcgcacacacagagctgggccccgtgggtgaggggctcccgggggcctctgagtggggagctgtgggtgtcaagtggccatgaagagagttgacccagggtcgggtggcaagattctctgagccccagagaagtcgactttctgtatctactagaatccaggaagagtgtgtccatggccgtcattaccccctgcttccccgtttcatgccaggtttttctcagatgccttctctgggggaggcactgttgctggggcaactttctggctgcagagggcacccagtaataaaggcaaatgccaagtatgaggcaagaagggacgcccctggctgggatggcaggcattgggagaggcttatgggagcccctcacccctctctttttggggtgctctcgaggaagctggactctccacctctaaagacccctccagggaacatagaacccaaacccaaatggagatgagctggccagcgaagtccaagaccccagtcccctccattgcaacctggggtgcgggcttctgtcttccaggttgaaagctcatcatttggttcatcataagttatacgtcggagtggaattataaaggagagagaaacagatgtgaactctcaacagctgggagaggtggaaagcctctggagttccattatagaaatgtgccttttggccaggagtggtggctcacgcctgtaagcccagcactttgggaggctgaggcaggtggatcacttgaggtcaggagttcgagaccagcctggccaacatggccaaaccctgtctctattaaaaataaaagttagccaggcatggtggtatgtgcctgtagtcccagctactcgggaggctgaggcaggagaatcacttgaacccgggaggtggagcttgcagtgagccgagattgcaccactgccctccagcctgggtgacagagtgagactctgtctcaaaataataataataaataataataataataataataggtcttgttttttaaaataaaaaacagaaatatgcatttttagataccagcaggacatcatagcactgagggaagctgaaccctctctttgggacgtagcttgctttcttttgttgccctggcctgagttctttcacatcagccagcatggagaagaggagccagttttgcagaatgactgggaacagcccctgctggggagggactctgtgatgcggtgtcctcatccgagcctcctgggcccgggttcccgtcgctgtgtgcccggagcctgggcgccgacaccgagcctcctctgtgctttcaggcatccgcatgctggacggcgatgtcacagatgtggtcgaggcaaagtcgctgggcatcagacccaactacatcgacatttacagtgccagctgggggccggacgacgacggcaagacggtggacgggcccggccgactggctaagcaggctttcgagtatggcattaaaaaggtgtgagtaaccagggctacaggggagcgctctgggacaagggtgacagtaaacattttaacaagtatcagagtgacactggccacagccctgaaacaagacagggaagactctgctgtgacaggtgccagggccagtgtggaggagtcactcggggagtctgagaagtggctcttgaccggcgagagcagaagtgtttttgcctcgttccagaacagctgttccagtgacagccaggtggccactgctagcacgaccctctctgccttggagtttgcccatccctggctgaagggggtacacaggtgggtgacgggggtctaaggcagctcacctggcctgttacttggactctgcaggggcctcggcccacctgcccttagaaacacccagctgtggaactctgtgcattcatcgcggggtatgtgctcacccaggccccgctgcagcaggaagcagtggtcggggtgtcccccaccagcgcacagcccagcccactttgaacttctccaggggaacctcacaaggggctaagcagggcaaagatgcttctctgccgatgggccaaggggaggctggcaggctcctgcgaggccacccgccagccactctgtggtctttggttccggatccttgtgtgtcaggaaggctgaggaagggggaggaggtggctgcagatgagccagttcttacaaacagggtggcaaggcagatttctgggtgaggacagcttcttggagcaggcagacagagctgtggtcagcgtccaggaggccctgggtggccgaacaggtcccagcccaacgtacaatgtgtggtcagtgactgctgtagggagtggggaccaggggagttccagcaggaagtccaggcttctctgactcctcctgtgggggatgggagaatgggagggggtggcaggagtcaagcccattaaatttatatcgtttaaaatatttttacagttctcatcgtattataacccatgcatagtgattgcagtgtggctcataaacagctagtaagtcagtcggatagtaggaagagattatactgcaaacagcctctctctgtctctgtctgcccacccccgagtcctgccccacggaggaggaatctgttttcaaaccatgttcatgatttcctttctctaagtaatatcatttgatggctttcctgggtgcgttgagtttggtcaccatctgttaatttcctcttatcagaatgagcgtttttctctcaggagacccctagccctgctgccctgccgaaaccctggagtttcctccacttcttacctttcccgggcgtcaggcctacactgcatcctctgcctcctgccagctgcacctgcctgcacctcctccgaaggacttggtgtcactctgcaagtgtgaggcggaagcttcctcctctactgcccccaccccccaaccactcaggtcttgaatgcctgagaaaccaatgaccaaatacagggtatctacccacctgtccctccgagtttagtactcacccagacactaaatgtgagaaggaaaattaaggaagaggggcggtgtagacacacacacgcacgcacacagcatggggtcttgcgggcatccttgggacactggacagcttcctttatctccattcccccaagaaaacaccgaggcagcttcaatgaggctgctgagcacctaagccaggcccaaggctgggctgagtgagtgctggcacactcgggtatgaccaagtcagctgctgcccaccaagaactgccgaatacataaatcacccttccattacttagctcccagctccaacccactagatcgcttggatctcagtcttgatgacaagcgagacatcctaaaaattaagctgaatttaagcttcggagagggtgggtaagctggagggcgggtttcctgcatagaacatattgctttggatggtgttcctgctgagcgtctgtcatttctacgggatgatttccaaagatggagctcctaggatgaggcaccctccgtccaggaggggtcctggttgtttggcagtgatcgttcgggctctctggttcactgagcctatgggaggcttggggaggttggagctgcagagagggatctttgcattcggaattctgagcagtgttggtttcatccagctgtcaggggagtggggaagttgcagaggggaccacgtggtttcccctcattcttgtcacagttttgtgaaatactgaggtcatttgattttttttcgtcatttggaagtaaaatatgtcatacagagaaccttaaatcgcaactgtctcgatctgtcactgaaaatcctcctagaaatttgatgatctcaaaccaaaccacattcccccatctgcttttcctccttgtggccctatttgtcgcctacagtcttctgtaaaatctgactttatctttggtagatgatgtggcccggcggtgagagactgtagaagctgtaacttggcacaaagatctgtttaacgttggtccttaggaagcctggctcctctcacacctagttattcagaagggaccattagacattgctgtggctaaagacactggccgcgtccaggtggccggtgtttgctggccctcagtcgcggtgcttctgagctcatgaaatgaactctccctccccagggaagacatcgaaatacgatttgattgggttgaagttgtgagtttactgaaaagaagtgcaagttcatggctagggttgaaatgtcccctacagcttctgtcccatggcttccatgaagccactggaagatctgggaagtgaaaataaagtcgtcagagacagttaaaacatctctacactcctcagacctggctgtttcctcgcctcatttccatgtctccttcccagaaaccgttttaaggaggggaaaggttgttggtaccttgatgcctatgaggatgggttggtctcatagtaaatgcatgctacatgctgtaaatgcaaaccttgagcatttcaggctcttggtattcaaagtggggtccagagccagcagcactggcgtcccctgggagctcattagggatgcacactctcaggcccaccctggactttggggcacaagtctgcattgtaacaggttcccaggtgactccagggtgtgcacattcaagtttggggagcactgtttttggccattctctgctcctggagcagtaaggttgcatgctccaccttgcaaaaggacaacattttataagtcatttcaagtggggtggggagttaggagtggcagtgtctaggactaattctcacctggaataaggacaggctctgatgggttaaataccttttgatttgcattgtagttgctttaaaccggcttcagctgaatctcttcctgcaggtaatcacgtgcacacacacaccaccttcctgagctctttgtgcctttctctcagaaggttagcttttctgggagggacctttctgttgagctcttggccaccccgacaggttcaccttgcagatgcagaaagcagagtggacgcggcagccttaagcagcggggctgcgtgagctccaagaactttcctgtgggctttcttgggagcctcaagttggagctggagtctccttggtttacaaacccccgtggtgtgagcgtacagagcaggcgggtccactcattgtgctccaaaagtgagtgtgacatgtttggtcagcagcaggcttcaatttggctctacggggattgcagaattggtgtgtaagttatctttaaattggccgattgttgagcataagtataaatttcctctgtttgtttgggaaggacggtccttagtaaggatgtgatggccagccagtggctccagtttcccgtggaggtggatgctggcccttctctcgggccagctgtgcaccaccagcccatccagccatctggactatatccgtcagttcagtcttccactcgctaatctttagctggtacttgtggctggaatgattctcagtgtggtcagaaatcatccatcctgtgggtatgggatagagcggagctgcaggaatctgccctgactggctgctgtctttcaaagacttgctttcatgtgtacgttcttaacaatgaacaccggtgcacagctgggcatggcggcacacttctataggcacagctactctgaaggctaaggcaggaggatcacctgagcccgggagttccagaccagcctgggtaacgtagcaagacccctgtctcaaaaaaaaaaaaacaaaaaacaaaaaaacggaaagaaaacctacacacaaatgaggccctggccttggctagtgatataaatcagaccaccctgatacttacccactgcagagaccacagggagctctgacaggacacccacaagctgctaccagcttcctggacgtaaccctttccacctattctgtcttcacgcagagttcatggtcctatccctctttgcaaatttagctctctctgcaagaagggtacctcttcaagtatgttttccagaaaaatcattcttttccccaccagaccagctctttcaacccagaaaaattaaagttgtaaattcttccatcatctgtaatctcagtgtcatttgcagcactgctagctctctttgatcctaggccattgcgatggaaatgacaggcatggctctggaatagagcagcttgtgttgggacccttgattttcctgtgaagaacagaggagtctttctggccccttcccctcgtatgatcctgtgattctgcaattttaaggctgctgctacaggcaaaggcacaccattaaaatccaaacagagcccccaaaaccatgctctcagcagcatccagatggtctgaatgcaaccttcttatccctttgaaggaacatttgggagatgggactctaggttcggggggagacccaccctacgaggttctgctgcggggctaagccttgttcctcttgtccctccagggccggcagggcctgggctccattttcgtctgggcatctgggaatggcgggagagagggggactactgctcgtgcgatggctacaccaacagcatctacaccatctccgtcagcagcgccaccgagaatggctacaagccctggtacctggaagagtgtgcctccaccctggccaccacctacagcagtggggccttttatgagcgaaaaatcgtaagttctcttggcaagttggagtgcttacagtgagtgcctcagccctctgggaatgagtttcttctccctttctcagaaagatggcttagattgaggccagattgttccggatcccagggtcccagcctcacccatcggcgaacaatttgagcctggaggtaaaccccagtcccttggcagccttcctcggacactggctttctaatctttgcacagaaatagcagttaaacccctctctggctttagagatctaaaaatattatttaagaacgaggttccttctcatgatgtcttgttttaactctgaaattctgtggtcacatgtcttggaatccaatgaacccatccagttccagcgtgtacaacagagtaagagaaagacttggttttatactgagacattctagaaatccaggagttcttctaggcattctgttgctacagaagcactttttctggacactttaagtcgagcagtggtttctgtctgttccgcttacttaagtgaacataagcatgatttgtcttttaaaaggtaactgttttagtactcaggtagaatttgtgctttttccttccctacatactttcctacttaaaaaaaaaaaaaaaaagaggaagggagggtttccagttcaaattaatgcagaattgaagtgcaaagtcattacgttgacttgtagacattttaaaaatgagactgtggagctggccagacatggttaaattttaaagctcactagcatcttttcatttctgcggctgctcagccacatctttcgaagttatttgcaaatttatttttacacttttctgtgggagcatacaggcttcctgttctcggctttgctccgcaccagtgaaaggtcagctgccatcgttctgtcgccagcctggtagcagctcggcctggttaactaaggtattaatttgttattttccttttctgctggagtacgcacccctgggacgggcagctgagatgctgaatggtgtcctgtttatgtagaaatccagctcatttgagcacggacctgctagggtcttattagacagacagttggccaaaacccaacatagtcttgctggccgaatggatgcaggttcgaatttgctaagttatgggacagtttataacatggactgcgtgcaggcaggatggtgtctctcaaccctggaagtaggacttgcagctttatttgcattacgaatcacgtcagcgtgtgatctgtatgccatgcatgtgtgcgtgccttggctataaaatgctttttctttcttattttaaaattctcttccctgagcaataatatgtgggtaagaagggtatagtttggagaacggtaaaagagaaaatatactttgtcttggtcactgcccgggaagtctgctctgacaggaggggtgttattttcagctctactagagtccagcttttgttctgagtcctcttagacgtcctccagggagacgagtgctgctcaggatagtcgacatatcacagtcccagcattcaggcaggcctgtgatggcgatcacaaccctgtccgcctgcattctctgtccctctgagtctgaggaatgtgagcaggtgtgtccacctggagcgagggatgtcctgtggtgacacatgactctttatagaggagtaaaacctaaagaaagcatctctcaccagaacaagagggtatgttcgttcactgaacacgagctgtgtcccaggcgtggcactaggactcaggaggggctgtccaccttgattcagccatccctcccagggtaggcccctctgctcgctccccaggacccccttctctgaagctggagaaccagctgtgagcctcacatgctcttgggagcgtggcctcctgcccagccacccctagtttctcctcctggccaccatttaccaagcccaagtacattcaggtgcctggctgtgatctgccgagaacccctgaaatctatatcatggtgtccatttgcatatgaagatgctggagtcagagagggagcatttttgtcccttttcccatgccctcagctgccctccccatgttgaggtaccccagccccactgaaacgaacaaggaggaaactggtctctgttggccttcccgtcacatcttcctgtgtgtgacacagaccagacccccaccttccctagacagttggcccagctcaaacgtgtgcaaggaaggtgctgagttcggaagaggatctggattgctctcactgtgaaattgattctcaaaggttaggcaaatcggctactggagtcctgtggtgggtgggtgggtgtgactttcctattcctgccataacaaattatcacaaacttagcagcttaaaacagcacaaattgatatctcatggtcctgtaggccagaagtccaggagcctcagccgagtctctgctttgagtctcacgaggccaagaccaaggtgctggcagggccgtggttccttccggaggctcccgggagaatctgtttccttgcccactcgggctgttggcaaaactcaggtccctgtggttctgggactgagtttcccatttccttgtgggctgtcagctggggcccgttctcagcctttggaggccacccacattcattggcttactcctcagctccctcttcaatgccagcagcggtgggtccagtccttctaatgcttcctctctcaaacagccttgctgccttcctcttccaaggtggagggccctgtggtggcagcaggtctactcagataatccaggataatcttcctggtttaaggtcggctggctaccaaccttaactctatctgcaaagctcattggaataacaccaggggacaaagatgatggggcgacaatcccacctagcacacctgaacccacacaggctgaacccccagcacccacttcccgtttgagtccaacgggagatacacgtcagcctgagtggtagtgaggtccagaatccatcccacacccagcctgggccagtgcctccgaggagggcaggcagagcccccagctagcggtacctgccttgttgccctgtgcagtaggccttgggcggtcaagaacatgccaggttgatctgcttcttcaggaggacgtcctggtggagaacccagcttatgacctactggctaaaggcagaaactctctctgagccacctgggtatctctagctgctctgaagtcagggggtgacttaggggtagctagtgtggactctgatggttttgccgtgggtactctcggctgttggtgacaggccacaaagtccggcagacccagggatgagggcttgtggggtgcgtcttggtttcatgttgttttaccattttttccacatgcgcttctgcagtagagagggaaccagctgatctattattatcaaagcgtacggtctgtgctcccagctggccttcttgcccctgcctgtcttcctacaaagtgatttagcagggagcaccagatgttgtggaaacctgtggttgccgagatgcatttgcctaacaccttatttgttcccgagacccagggtcacgcttgccagttagtggcacctgaagtagcccagccttctccacagagtgagttagcctgtctgccatcactgcctcactgtgcttctctctcccccaggtcaccacggatctgcgtcagcgctgtaccgatggccacactgggacctcagtctctgcccccatggtggcgggcatcatcgccttggctctagaagcaaagtaagttcccacttacctttttctaaaaaaaaaaaatgtttagattgtggtaaaatacacatgacattggccattttcaccctattgaagtggacagctcagcggcattaagcacattcagtgagtcgtgcacctgcaccaccatccctctcccagagcttcgtcttcttcccaggctggaaccctctgcccgttaaacagcagctgcccaggttagtcagctcaggctgccgtaacagagtcccacggactgggcagctcaaacaacagaaatttagtttctcaaagttctggagcctggaattcctggatcaaggtgtcagcagggttggtgtcttcttggcttgcagaaagctgacttctccccttctgctgtgtcctctttttataaggacactggtcatattggattagggcccaccctaataatctcattttatgttaattacctttttaaaggccttatctccaaatataatcatattctgaggtactggggcctaagacttcgatgaatacattttggaggggacatagttcagcctataacactccccattgaccccccgccctagcctctggcaaccaccattctactttctgtctctatgaatttcattgctttaggtgcctcatgtaagtggaatcacacaggatttgtccttttgtgcctggcttatttcacttcacataacgtctttaaggttcacccgtttgtagaacgtatcaaaatttccttcctttttttaggccatcctgatgggcgtgaagtggtttcttcctttcttaaagcccaagtctcctgccctttgtaggacacaggggctggctgggccagagtccaaggcctgcctctgattctgcacctcacagcaaatccacactttaggttgcgctggcttccttttaggaactttcatttataaattaacagtcaagaaatctcttgagttgcgtatgtgttgttggttcagaaagaaaagcaagttaaccgcacatggagtcatagagtcaaaaccaaattgtactttagtcaccaaaactggcagagaacaaaccagccctctgcagtagtcatctgttgtagatgagttttcaaataactcaaaaagaatggttgggatgcctcaatgcttgtaattacgtgtgtttgcatgtggatttgcacaagacaaactgagcgtaacactcaaatgctaccaatgtaacaaaggaacagtttgatatttttgatttccaggccaaaatgttagcttctgtgtcctgaggctctttttaaaaattcttcataatgagttgcttgtgtggaaactcacattcgcatactttacccttccttgcgctgtattttcctccattccttattggaaacatgcaaagagctaaatggaaaacaaaccctgctccggggcgcattgtccccttaaacttggtcagtgggcatgtgaaagctcagacggtcatcttcctcatcatgttagctcctcctcagacacatacaggggacggatcaggcaaacatcatttggaacaatgtcagtctagagcgctcgacacttacaggattggtcaaggaaggaacggttgatgtctgggaatttgaaaacctgtgttgagcagacctgtagcctgggatagctctcgcctgtgcaggttggccccaggccgccttctctctctgttcactactgctgtggaaggaactggggcaaagccagatggttctgggtggagatgctccctgagagtctggggagggcccccagacagcgtggggccagaatgaaggaaaacccatacgtgttggaattctctaaagggagtcccatggttttgggacagtcttggtacttttcaaacatccgttcttcatcaaaaaacattttcaacatcctctcttagacatattttccatgcggttatatttgtgattttattgctagagtcaaaaataaaatagattttttcataagaaaatggttcctaactttctcactccctggacccattctgtcctccactccaaaggtcatcccggcacctaaattcaagatttccaggaggactggctgtagccgtcttcgagtacgccctgctgacacacagcagtaacttgccaggttgcacgggcagcatggggtgtggccatgtcagcacttgtctaaactccaaagcctgcacctgtgacctctctaccagggtgcacggccatgggctactcgaggcctcagaatctcccctaacagtgaggttggcgtgtgggccgcaggaaggccagtggatgcaggaggagaacaggtgtgcctggcagggaaagtcctggagactgagccactggacacggacggggagagacggtgaggaagccagtgaccagccaggagcagcaagaacacattggagaagtcaggggaggccagggctggagcctggagagtgtgagcccagggaaggagtatacccaagacttaacgccatgggtgagcttctcgtaggaaaacaggcaaagagggggccgagggtgggagtgtgcagagcagccgccatacaaaacagtgtagcgcgtccttgaaaaaattaaacagactccccagacgatcagcaatcccacttgtgggtgatatccaggattgaaagcagggactcgggtagataccggcccagccatgttcatggcagcatggttcacaacagctgaacggcgggagcaacccgagtgtccatgatggacgaagagatcagcgaagtgtgctctgtacacacgtggaacattcagccttgaaaggaaggagattcggatacagattatgatgaggtccctcaaggacgttgtgctaagggaaataagacaaatcctgtgtggttccacttacacgaagacctggagccatcaaactcatagagacagaaagtagcgtggtgcctgccaggggctgcagaaggagcgatggggactgagtgtcccgtgggacagagtttcagtctggaggtggtgaaaagttctggaggtgggtgtggcggtaccagagcaatgtgaacgtccttaatgctactgagctgtacctttacaaatggttgaaatgggaaagtttgtgttctgtacgtcttcgcacacccacacacagagtgggccactggagagacgcctgtgacatcccagcaggtgccactggggaggccggggcagctgggtacttcagctctctctcttctgcgtctccaggccccctcagctgcagcagctcccccgattttacttagtccgtgttcctagggtcacattccctgaggcagcacctgtggcgcggcgtgcgttcctagtaaacacgcaccgagagcacggtgtgcgttcctagtaaacgtgcaccgagacaaggctggggcttgtgcttctggtcacctgcatcccaacgagccctgggaagatggtctggaaggaaagagtatgtgtttgtgatattagggagtgagagtcttggactcgagagatgttcgtttattcttggttaattttctgattgaatagaaagtcctaggtaggcatcaatttaaccgactaaaaaaggaataaaagatctataaatatttatctgtcaaatggcggccggaaccatgagcccatacatctttcttttcactcagctgtttgatagggcaaaaatatattcctttcattactgattcacatgtaggtgttatctttaccatgttttaaagcagccttgcagaaagcttgtatgttcaaatatccaggttgcatagcatttaatactgattagaagaaaggaacaatgctcttattttatactattctctgtgtacagatagtatgaaaaatactatatttcatcgaatccaagatgccataaagttgtaagatgcacctttttatgtaccacagaaaccagaagtgctgccattatacaatgcatccatatctcttagaatttttgtaactattgaagagttcttttaggctgagagttatttagacctggaaatgacactgtgaatagacaggaccaagttcagcacctccaggcaatgtaacccgttcctggttgctgtgggcagaggggcttataagaggtatcagatcataagatggatctggatttcagaggtgttaaaaaaaagaaaaaggtgggccaggtgtggtggctcacacctgtaatcctaacactttgggaagccaatgcaggaggattgcttgaacccaggaattcaagaccagcctgggcaatatagcaagacctcgtctctacaaaaaatgtaaaaaattagccgggtgtggtggtgcacacctgtagtcttagccacttgggaggctgaggtaggaagactgcttgagcccaggaggtcggggttgcagtgagccaagatcacaccaccgcactccagcctgggcaacagggcgagaccctgtcttacacacaaaaagcaggggtgagcaaatgtgtcttagaaattttaaaaaatcatctgtgtatttagttacattagtggcatgttgtattcttttgatgaaatgtttctacttccccaaaaagaatattttgcaaatttagaatcatatataaaatcttgaattataatctacagccagtgggtccacacaggatggaatctcggccaatcgtggtttgaatgtactcttatgcactgttgtatttgcttaggatgaagaataaccccaagtatttaataaacatttactattatgttaagtgtcttgtattttcagaatttcccatatggctctgggcaaactcaggcagagcttggcagcaaggctaggctttaatgcttatgaattttgggtcacccattgaacctttttttccctcaggatttagttgccggaaacttgtttacaaagaggtggtgaaataaacccttgccaaggaatgcagtccttagcctgaggggcttgctgaagttcagacgtgggttggctgccgaccccctgcctctgagtggcctgtgtggctgccgttgttgagctgtgtggactctagggtgtgttgtgtcattgcagcagccagttaacctggagggacgtccagcacctgctagtgaagacatcccggccggcccacctgaaagcgagcgactggaaagtgaacggcgcgggtcataaaggtgcggcagtggcgttctggtggaccattgggtggccctggaatgtgtaggaaggggtgtcatgaattccttaaaaggactctccaaatagcattagttgttattattaattgtgtgtcacaagaatttaaaacgcatgtgcagctatttaagaaaagtatcccggaagctcacagtgacattacggaagaaccctcaggtcacaagagtctggggtctcctatactctataactttggccacaccgagacaccacctataccaatatttactcatagttctctttaagccaggagcaatgacgtgtgcctatagtcgcagctactagggaagttgaggcaggaggattgcttgagcccaggaatttgagtctagcctggacaacacagcaggactccatctcttaaaaaaaaaattacttcccccactacttttttttgacataaaaaaatgtattttaaaaggaaactgtactacatctagttaatcataggtttgatatgtagttacgtattttttctaatgtgcattaaaacaaatccataattattaaaataaatgttgtttgtgtgccacctgagggcagcttgcatccttagccctgagtagctctgtgattttgaaacttgccttcagtttcctcatctgtacaatgaggacattgagatagttttgtaagttactttctaactgtaaaacttcttttggccagtccctgtgttataaaagtaaatcataggacagtggggcctctaccctcagcccagcctggtacagacctaggtaccatgaaatcaacccagggtcagggcttcgttaggctggctgttggcggcctttgaagcaggtaattttaggacagtgctactggctttgtttgcctgacttctttttttttttttttttttttttgagacagagtctcgtcttgttgcccaagctggagtgcaatggcacgatctcggctcactgcaacctttgcctcctgcgttcaaacgattttccttcaaataatccctcccgagtagctgggattacaggtgcctgctaccacgcccagctaatttttgtatttttagtggagacggggtttcaccgtgttgcccaggctggtctcgaactcctgaccttgtgatccacctgccttggcctcccaaagtgctgggattacaggtgtgagccactgtgcccgacctgtttgcctgacttcttatcaggtatactgaaaaatatttcatttggccgtagtatttatgttagggaggaatttttttttaaccttttctgaagctcaggtctaactaatttgacactaagtctgatactactatctgtaaaatataggtcaagcatagttaccctaagtgccgagggacattccttttaataaggaggccatcgattgggctagttcatctttgttttgcaggaatgtcggtggtagtggtgtactgtaacaagagctgacccacattttaattctggcctaattaaataggagaatagattgtatgcagttcttgaccttgcctcttaaattaaactttgaaagtctcctgccctggccaaattaaatactggaccgggccagttcgcaagcctgtctctgtgctgtgctgttttcccggaatgctctgggaactcagcagggaaagaaaatggcaaaaaagatgagtacagccttgtgttattgcatttcgggcacgtggtaattgtgtgaactgagaggtctcagattttgtttctcttgtctggtcttagattcagggagcatagatgctgacaagcccttttaatgtaaaggaacctgtctttgtctcaaaaaaagaaactcctagaccttctcagcacttctactctgtaccaaagcgggacgtgtttcctgacccacactcctaaatttagcagaaggagttgggttcagagagagtgaggcagctgggacctttgagcagccctcagggggacccgtcctgcagcctggggcccccaggagacctcgagtcttacggtccctctgtcctccatggggcccggcagatgcaagagccagccttgctcccttcctgggagaggcaggagagcctggctctgaagggcctgtcttttcagttagccatttctatggatttggtttggtggacgcagaagctctcgttgtggaggcaaagaagtggacagcagtgccatcgcagcacatgtgtgtggccgcctcggacaagagacccaggtaaggctctgctgtggcatcggtgacttctcaggcacgtgggtttggagctgactctgttgtaaggtgtggctgggggaggtgttcacacatgcattctgtgcacatgtgcgtgtgcacgatgcatgcctgcacacgtctgcgttttctcttgtggattgtacagctgggaaaggaatcacttcttaagccaccactgttttgaggcctcttccccttttgtagcagattgctccacgataggggatcagttcctcagcctgaaccactcagcctagtattggaaattcttacccgtgtttagcatgtcagcccaagtcaggaatctgctcctcccagaaagtgaaatggggagtagctgcaggtgtcctttctgtcaccaccggctagagattggagctgtagccccagcccagcctaactggccctgggagtctgcagtgtgaatccaccaggcctgagcaggagcagctgggtcagcctcttctctgttgcaggttgtggggtactgcttattattcacagagcatagcagctttgtgtggcttttatctggctccgtacaaccttcttaaggcttaagcgctgggatttttttaacaaggctcgagcagaagggccctggcttcatctctctcccgtgagcagggcacacccggaactgctctttggagtaagtgtttctaaatctgttatatttgttcattgattgattgattgattgattgagaccgagttttgctcttgttgcccaggctggagtgcagtggcatgatcccggctcactgcaacctctgcctcctgagttcaagccatcttcctgcctcagcctcccgagtagctgggattataggcacccaccaccatgcccagctagtttttttgtatttttagtagagatggggtttcaccatcttggccaggctggtctcaaactcttgacctcaggtgatccacccgccttggcctcccaaagtgcttggattacagatgtgagctaccgtgcctggccaaaatttttatttaaaaaaaaaaaagcagccataaagtaaatcagaaagcaagaaccctagcccactaggagaggaaatcagattattccaattctgccatcgcagctgtttttaaggagaacggtgtttctctgggccttgtatctgatacagaacggagtgtgtttttcccataactacttgttccctttggaaaacgtgtttgaaaaagaaacagtgtgatgactgaaagtgatatatttctttatcaacaaatacaggtcactctctttagatgctcttccttgaatatgcctctactcttgtaatacactcttgccacaaatagttgagaaaaatgtgtctggtggagggctcgcatatggtaggagtgcagagagtgtgtgttggctgagcagctggatgaatagccacagaaggatcttttgaaaaatcacctttttctcccgtggctaattgcacactgaccgctgagtggtcactgcaggccccgacaggtcggccagacacctgacaagcctcagtcttgacttcttaaggcgtcggtttctctgaggagccttagactgtcaaatttgaaacaacgtgggagagtctctgagataaaggaggttttgccttctctgtctttgctggaaaacgcctgcagcctggaccctcagaggctaggtgagggaggtgggctcctgggtctggttcctgacctgggggctgccctctgccccggcgcctccgctcgtgtccccgtcagggcggctcctgaatgaagcattcttctcctgccagaaatcgttttaagatggcagagtggtgcctaggtggcgagtggttgtttttatttttattttattttgttttttaagtgaaagcacacggagtctagacagcacaggttgagggagcccgccgtcacatacagtgtaacattgttcctgtcctttgaggaaagtaaggaccctccaaactccaagaggagaagaatcagacttctgtttctgaagaaaagtcatctttacctttagcagtttcagactctttctgggatattcagccagcctaccgtctcacaccacttgcttatcagatcacttgcttaactctgtaacgtggttgttgcagaggacatacgggcctccagagagaggggtgttaccaagcagagttccatgcctcacgtccacctgtgggtctcccctcctggcagggagctccagccagctctgccactgagcctgcctgcaggtcggggtcatctgcacctgagccgcgagtatccccacagctatgcgagttttccccatcggggttcccagctgctaggatcacgtggccgaaaatgaaaaggaagcgttcccacacagccattttcccgtcttcttctaactgccccctctccgtgcacgtttgtgggtccagctgtctactctcttggcctcattctgatttcttcctctcatggtggaatcctaggacttcctgaatgtcctgaacctgccctaagctgcttcccatggtgaagagcagagcaagagggaagacagagtgtgtgtatgcctctttatacacccctctcgtgtgcatccgtgtgcactgcgtgggatatggtgactgtcttttctcttgaacaggagaggatgctaccctggtgtgaccaaaggtcagacagctgtgttcactggatgttaagcacgggagtcctctagctggggcatgtgtccacacctgtcaggtctatggtgacgtcacacatggtcctgagggagaggggctggggtgttcatacgtccacccctctggtcacgggcaggggcaggaaacctctgtctacccccagccgtgggctggaatatggccatggttcagggagactgtcctcatggcggtgactgacaggaagagtcaaatgggctaccccttctgcatgtccctcctgtgcacccagcctgtgctcccaaactagcattgcatccagggccccgaatgactgcacagagctggtgccccgtcacccatggtgtccccctgcggagctgctgtctccaacgctgccccagtggctggcatcacagccccgcctgcccgagtcatgctcaggcccaaaggcgcggaaaggccaccagcacagcacaatgcgggctgcagaggaaggagctggggcggtgatgccagacccaccagacacagtccccttcaggaggcagctccgtcatttgaaaaaaggccatccatggtgtgaaaaggactagccaagaggggaccccaagtgatacgttggcatttctcacctggacactgcacatctggggactggggggtttgagcctgtctgtgtatggatccacccgaaagataagaagaagtccctggaagggtagagaacatcagggaagaggggacctcaggtagggctgggcctgggtgagaatcaaggagccaggccccctgctccaaggtaccacgggatcgtgctgggcagtctctttactgcctggtgtttaccctgccctagagcagtctgagccccagaactgaggtattgatgtctgagccacctctccaggagcccacacggggtagggcccatcataggctttcaggaaatgctaaagctaaatgcagaggcgagaggaaatcacttaaactgaatggcagctgctgttagcaaaagagagtgacttgctagagtcctccaggatagcactggatgaaagtgccagctgtgcctgggcctctgttgtgatcgtcagaccgtagaccagaggcacgtcgacctactcctgggcacaaatggtttccatctgtttagaacctttgtcaattaaacgaaggtacataggatcatgaccaggggcatctgcctgtgcaaaatgattttaaaatctgtgtgtattaaatagaaagataaagttgatatttttatatcttttcttcaaatgaaaaagaaaattaagcttagtattattccaacgaatgaaatagaggcccagctattaaatattctatttgactcttgatttttctagccagtgcttctgtcgctgctttgaaaatccaggcttctgggaaacagtgtatgatatgcatgactcccacctcagtgctggggacactcacaacaacagggtcttttaaaccaacacaaagcgataacttacctgcacgtctttagtttctgctggtttggaaggttactgtccagacagagcttacagtttagcttggcctgtcttttaatgaactcttcacacacccacaacccacacaagacacttcagacccaaaagccaatgtgttgctttgactatcaaggcttatctgtagagcagataatctttttatagatgttcaggaattaactctggattagccgcatatcacctgcttttctggaatttcgtgaaactagactgcgtatggcggtcattttaaaacaactctatttatgaagacatatggctgtggatgagagataatggattgtgattataaaggcacttactgtgtgccaggcattgctctaagcactttatataaaaatccccaataaacatgtgaggttggagttctatctttatcctcattttatggaggaagaaatggaggcagaaaggagttaggaacttaggcccagaggtggggtgctgtggggctgagctgctcccgcaggctgcttgtctccagagtccaccttgcccccctaggtaggagctcaggcggtactgagccaatgagagcgacctgcccacccgttagaagacctcacctctgtgacctctgtgccaggagctagctgggcgcaccacctccagggatgataaagtacctgaccctggctgcccagagcttcctccggccttggccaggtgccagtgcctaagagcacagctgctggcgtctcatctgcggcaggtcagctgggcaagctggtgaggccaggagcccagcggcctggtggagtgccgtgcggatcagacacaggtcaacccagctctactgtgctcaagcacacagcctgatgtgacgtctttttaggaagccaagagccctcgttttctttgggctgtctcagaactatgcaggtgtctgccaccctcccatcccctcctcaccttacccagcctctccctccagggcatctgacctctgtgtatacctgggtaccacaggaggcccttacttctggtttctcctcttgggctgttgttatacagagcatgcctgggtgtcctcagaagatctgtggggtgctgtgcagtcccgccctgggggtaaccacagtggacccacaacacttttcctgcctgctgctaccccttgtagctgcgagcaaacttaaccagctggttatgttcttgcaaccctttcccttcctggcttagttttgaagcaaacttcttttccccaaattgtaaaggctacttatttctaaaattaggatttggaatttgaatacagttgattctccctatttgtggtactgttccacaaagtcaccacgaacactgaagcgttattcctaggagagatacagggttaagttcctgtgagcctccggtcacatttttgccagcctgtccatatagaccgagctttatgtgtatgggtttaaagacagcttatttaacatagatcattggttcattcactttagactcacagcggacagcactagtgctcgttgctggaaccaagcttgtcttacccgtgtgttttctccttaaggcaggtctctgctttctcatgctgtttgacactagacagtgtttcagcactgcacttggggccatttcaaacagtgaattcaccaacagaaaagcacagagccaggcatggtggtttgcacctacagtcctagctactcgggaggctgaggtgggaggatcgcttgagcccaggaggtcaaggctccagtgagctaggattgcaccactgcaccccagcctgggtgacagagtgagaccctgtctctaaaaaacaaaaaacagcacaaaaatgtgaaaaatgtggcactaaatacactgtgaaacagacacttgtttttatttgagatggagtctcactctgttacccaggctggagtgcagtggcgcgatctcggctcactgcaacctccacctcccaggttcaagcagtggtcttgcctcagcctcctgagtagttgggatgataggcacatgccatcacacctggctaattttgtatttttagtagagacgggctttcaccatgttggccaggctggtctcgaactcctgacctcaagtgattcacccacctcagcctctcaaagtgctgggattgcagccgtgagccaccacacctggccagaaatggacacttatttatggcatgagagctgcaccaacaggcggtgttgccttgtttgacctcagctgggagtgtgctcgttgggggactcattatgttaccactctgcacacatctacacatgacaccaaagtgccgcaggtgttagtttgggggatacaaataaatgtcagccaccaggtgaatatgcagatacagcatatgtgaataatgaggattgactgtatattttattttctcttttactccccttcaggttgaattgtagactgttagaattggaaggcatctttaaagccagctaattcagtcccctcatttaacgtacaggaaaaagtgtgctataaatttaagcatgacatattaaagcaccttctgacccaattaactgtggacggcattgtgtaagttaatgtactggattagctttttttttgaggttaaattttatttctcacctaagtgatgtgctatggtttgatcatcaaaagtaattttggccgggcgccgtggctcacgcctgtaatctcaacagtttgggaggccgaggcgggcggatcgcctgaggtcaggagtttgagaccagcgtggccaacatggggaaaccccatctctactaaaaatacaaacattggccgggcatggtggcgcatgcctgtagtcccagctactcaggagtctgaggcgggagaattgcttgaacccgggaggcagaggttaccgtaagctgagatagcaccactgcactccagcctgcggacagagtgagactccatctcaaaaaaaaaaaaaaagtaatttcatgtgaggaaaattctcagtctgaactcatatgaataaggaagcccacagatgaatgaagcagcttacctcagagcctaacgacagtcttgttgagagcgtgcatcctggaacacaggtctgagaagtgacctagaagcctcttgccaccttcacacgggcactgtgtgccctccgacctgctgttttcctattgcttaatttagcaagtctgtcccaattaactcttgccattccattcactcccgttagcgggtctgtgaaagggtttcctggatgaccttctgctgtaatgggcctcagttctttagcctctcctccccaagccaggtgccagcacagcagctggcaggatgctgctggctcctgattctggagggtctctcaacatggccctagaacattcatgggcccagtgaggaacaaagcaagtgcgttgtgcaaggatccaggttggtccaggaagccaacctggggagagggcttcaaggagggagtgagaaatactgacatggagtagcttcccaggtagaacaggaaaagtggagagcttgaggcggagggtttcagcctgtggcccgtcttcctgcttcccctggcactcggttacttgaaaatatttatttttgctattagatagtattatgcattggaaaaaaaaataggaggaggccaacatatctgtggtctggagttcctagggagtcagcagggtggctactgttggtgggccttcgcctcctcaggagaagggagcgggtggagagcatttgggatgaatggagaacatctgaagtaccagagtaattaacgttgaaatgtggctgcgtggcacgtggcatttgctgtcattagagatcttttccaagtctggccgtctccctggcttcaacaacgcacggtctccaggcaggttttgcgggatcatttaactccgtggactcccttagcgtcctcggaagatggctttatgtacatagaccacagtttcagaagttaatagcagaagacacttttcagttactttggggactttaagatctttctaaatcagttttcatcattaaagtacaatgtaggtgtattcacgtgacagtgataatctctgcacattgtttaacttgaaagataaattacttggcagtcgacttgcattttcagcgttaccttagaaataactgtagggtggagaaccacttctgtttttttcattgactgttctactttctgtcttggagttaattttttaaagtgatgacttttgatagatggcttccttattttcttcctggagtttctatctgaaatacagaaaaatttgagcacaatgatcatgaaacattttgaagcctcctcttttatttctcttcttaataaaagcactctaattggggatgttaggttaatggtttcaatagcaaccacagaagtaaaatgtgtggggagctaactgcatgtcaggaaggtggcagcgtgccctcctatagtagctgtcctgggctcccgcgctgccccagaacttacaggaatgaggagtcctggtggcctgtaactgagtgatttagcagttaagagctttcacataaaaactaattgttacagttagccttgttccaggaggctgctgggctcctagcccccaggtgaaggtaagggcatggctttgaaaaccaaacgaagtgaggccattaactcctgcaggagctgggtgctcccgcccccagccagcctccctgcaggcagcagcagcggggctggcggaggatcacacccaacccagccttctttatgcagcggctggagtcccttagcaggaataaaaaagtcagatgcaagagactttcatactctgaaatgattttttttttctaggtgttcgctctgtgggtggggctcagagtggcggggcaggtgagaggtggggcttggttgtctttcacttgtaattaccctgctcccgttctctcatccctgtgccttatcaatgggattaaagcttcttcacaaggattccaggtctatttctagagcagattgatcacttcccctaccgatgagcaattggttggagtgtggggaccgtgtcttcaacttggttaaggcttttgtgtctgtttccccttgatcttgctattcagcactggaaaggtgttgaagtgtgagagtgtagggttattcctggtttttggggttgactgggagctacattttgaagccccaggggagcactgagtaagtctgccggcatagacgtttctccgtctccacaccttgcttctccctaacgtacccaccttacattcttagtgtggggtgaaggtgggggatgggggacactcacctggagagacacatgggccctgcaggtcctggaactccccagagccttctcttgtgttcgccatctaccgcagcgggggctgctggccagtaaacactagcagtaaagcttgggagaaggcaatgaaggaagtcagcatctctagatcaatttatggtgcatgcaaagcgtgttttcaaatacttacagagtctccgagggaattacatcactgtttataactgttttgattgttttttatgactcagggcccagtagagccaagcagtgtaactcctgagaggctctgagcagaacgcctcatgcctcccgggaggagagtccaggcataatgggaaaagcgctccccgtaataagccaagcaccggtcgtgtggtggggagttattaatgtgctgctgggcggcggtgggtctgcactgaagaatgccatgtttcttcagctgcagatcactggggtgggtcgggggctgagttcaaagaggcatgaaccctaatggcctggaattggcaggatggtccagcctggacacagaaacagccttggggtacagattttggatctgcttggtctggggagtctgcttggtctggggagtgtgtcagaaaattctagcaggaaggagtcttgaatgattgaggctttgtttttaccctcagactccatcccatatggtaaagctgccctgagtttgtaaagggaaccatcgtccatttccatgacagggcaggaaagtgaggggaccctgctttctgcaggagatttgggagcacacaagcttggcaccctcgatcagcatgagagggcagcctccgaactccgagctgtgtccttgactgtgggtccacgcgagcttccattcgaggcagcgaggcctggaggcggaggcagtgaggcctggaggcagaggcgtgggctctggggccccaaatcccagctcctccccgcattagctacaccttgggtacagtccttaatttccctctggattaaatgggttaatccttggaaattctcaggccagtgccttatgctcagtgcacagtcagcttgggaaatgtttgctgattgctgttatttagcattgtgacttctattttcaatgctagtcttcggaacaaagtagtgggattttttatttgtttgtttgttaaaacatttaattatttttatatatttagggggtccaaggacaggtttcttacatgcacatattgcagtgtggtgaggtctggccttttagtgtacctgtcaccatggaggtcatactagggcaactgagaaacgagctggccaaatgccaccgaggagaagccgccttctggtcaccaaagggagcccatccctggggacattcacccaagtctgcccaagaacccatcttttattttattttatttttgagttggagccttgctctgtctcccaggctggagtgcagtggtgcgacctcggctcgctgcaacctccacctcctgggttcaagagattctcctgcctcaggctcccgagtagctgggattacagacacccgccaccatgcccagctaatttttgtatttttagtagacagggtttcaccgtattggccaggctggtctcaaactcctgaccttgtgatctgccctccccctccccccactttgtataagacaaaataattgactcagcagcaatgcaaggcagacagggccatcgtccagaggaatggggcctgtgctgtgcaccccacagcactgcccagcagcctggtctctccactgtaggcaagttggagcggtggcagcaggcggtgcctcggcctcccaaagagctgggatcagaggcgtgagccacagtgcccagccgaaccatctttcaaatctctgtaagcaaattccagaggcataaacgtcttcaggacaggtgataaagttcacagtggagcatccacgtgaggcagtcagaggctgctgcggctccccggggcccgcagggccctgaggctgcagtggggatagagtggacgggcgctggagctcctggctgtgtgggtgagacttcatgcttccggtgccaagtgctgagccctcccttctcccccaggagcatccccttagtgcaggtgctgcggactacggccctgaccagcgcctgcgcggagcactcggaccagcgggtggtctacttggagcacgtggtggttcgcacctccatctcacacccacgccgaggagacctccagatctacctggtttctccctcgggaaccaagtctcaacttctggcaaagaggtaaggcgaggcaggcgtggggatggggtctgggctcactgagattgaccctgcacaagagcttctgtccagtcttgggcccacagtgtctctgcaaggccctctggcgttggggactcccactggttctgctggcagcttcctttctcttggagacccttgcatgtaggccccaaaaaccttaaaagttgctccctgaaaccttgccttccaaaaggtcctggaaaactttccttttcagagagaagtgacaaaagagttgttgtttcgttttttgttgtttagcggagggatttgtggaattctggctatgccttctttgcttagaagtgcattaaaggtcatttaatcctattcagttggcttttgaatcgagcatgtgtaccacagggagcactgtttgtccccccaccagctctcccacccagtcgtgggctgccctgcagaacctgcaccagcaggggcctgtcccgggaatacagacaggctcgggtggtatgtggggaaggtgctcccaggctgctctctgccaacttctcttgcgctcaggggctgggaattccaaagcttcgcacatggttttttgggaggctatggagtcatttctttaacaaacttagaaacaaggggaaatacattgatgcaaatatatgacttacaggtaattagaatgaaggtgtttatgggaacttaagaggggccagggtattctggtaccttctgtctctttctagctaagaggtagagagagtaaagaaatttcatggacaaatcagcatttccagcttctctcaaaaaccaggactggcactgtgcccacatcatctgcaggaagccccccaggaccaggcctgctctgtcttctggggtgtggtccccttgcccactctgggcccacttgactcctttggtgacctgcctgaggctgtggcccttgtgtaggctatagggagctgcagagattcagaaacaggggctagcgaaggctctcagatggaaccaggcagaagttgggggttgccctttgcttaacccttcccctccccaccactttgtatgagacagggtaattgactcagcagcaatgcaaggtagacagggccattgtccagaggattggggcctgtgctgtgccccccacagcactgcccagcagcctggtctctctgcagcaggcaagctggagcggtggcagcaggtggcgggcccggcaccagctttgtcctcggtgcactggaatcaaccctgaggcagaccctggcaccaagctcagcccatcccacattctcctttcatagcacgagtgtcacaggggcacctctccctcctgccgggaggcccggccgtgctgtgcctctgcctgtgggaggtctcacacgggcacgagcagttcggtgtcagcggacgagctgcagcttttgatgctatgttgctccccgtggtgttttttattttatttttttaaccttaaagattttaaaagtcctcatttctggcatttcttggaaagttggaagctgtctgacaccagccccgtgttcctgcgtgcactgggccggagctgagcaggtgggcgagtgtgtgtccatgtgctccatgttttccgtgctggcagccctgaggccagcaacgggctctccgttcactccagccgcacacctagtggcacccaggtttgtgacccctgactcagagccagagctgggtgcaggcccaggtgatggcccaggttgacggagagcctgtggtgaggctgagaggctggggcagcaggtagcaggcaggcgggtggcagtgaccctggagagttggcccacaccctgctcttccactcctggctgggctcccaggagccagtccctttgcctctctttattcctcatctctgaaaatgccacttcacttatctgtaaacattaggactgttataagacttgagtgtgataatatatgtatccctggcacaggggcctggttgccctacgtgtcctgcttacgtccggctacctgacccacaagaaccttccgctgccccagcctcccctctcccgctcccctggggccctgtttcccttccctggaaactttcctcctcctgctgctgcccagtgttgtgcccttgggataatagagggcaggtcctgccaggcctattgggagccaccccttggctgggtagtgctgtccttgcgccatcaggcattttaaaaactaccctagcccaggaagggtggctcacacctgtagtcccagcactttgaggggccaaggtgggtggatcacctgaggtcaggagttcgagaccaacctggccaactcttgtctctactaaaaatacaaaaattagctgggcgtggtggcacgcacctgtgatcccagctacttgggaggctgaggcaagagaatcacttgaacccaggaggcggaggttgcagtgagctgaggtcacgcctctgcactccagcctgggtgacagaaagagagtctgtctcaaaaacaaaaaacaaacaaacaaaaactaccctgaggctactccagctgtcatctgagtcttgggactttggtttttttccaaggcagattttgtgattgtatcaagaatttgtgttttaggatcaatgacctcctatcctactgcacatcttacttaatttagcagctttatcagtttgccaggttcttcactaagaagccattgatgtgcctcagcacctcagcccttaaaagacagtttgtccttgttctgtccccagtgtgttgggttcagcttggcatcgagtgtgaaaatcagccttgacctttgccatttcttagaagaaagcacaggatgcttccccctcactcttctccattgcaaagaatgttccctagataaacattttcctacattgagtgttcagagaacccccagattggaaattgaatcttacatcattcaaaacttatgtatttcaatttctgatgaacaataaagatgcctatgttaaaaaaaatgtttattccaaaatcgagatagaaaattagactgtgaagaaagaataagaggaaaaaacctggaattgattccagtacagaaagagtcacttctgaggatggcactgggtgcaggaagagattggatgttgattagttgcttcctgtttctgcctgaaccaagtgtgaggcagaaggcccaggggctcaagggtacagttgggaaagaccttcgagttgggaagggtaaagggaggctcatcaggacttgcaaggagggtactgctgggggtgggggagctgtctcctccccccgctctccacgggcccctcccattcccactgaaaagcaaccaaccctgccattgtcatctccctcaaatgcccctgttgagactggatcagccctgcaggtgaagggacagaactttccccacaagcttgagtagctgctcctctttccttatttgtgtctcccagagaacagtgcacacagctggcttgaaatcaaacatggaagtttcattcttgcacaaacaagcactttcaaaaggcgtccttagtgagcactctctgggcttcggtgaaggtaccccagggggacccccgcccctgtctgctttcgtgcatccgggcactggagttatggtctctgtaagattgttgctgggtgggaaggagccagccaccttctgcaggaaattgtcgggactgggggcttctgttggtgagagcttgtaaacatctttcactgggttatatgaaacctgcctgcctgcctgccttcctctcagaatgttaaggaggttcaaggaggtgatggaggagagagtctgtgtaagagcttaaagacgatcacatttcactgtgccctttgccctcgggttggctggggccagacccccgctaccctgggggtacggtccagccaggtcatacagtcccccgagagccctgcttgtgccagcccctccgcccagccactcagtaccagcaccttcatttctgacaccacacctccaattgcaggttgctggatctttccaatgaagggtttacaaactgggaattcatgactgtccactgctggggagaaaaggctgaagggcagtggaccttggaaatccaagatctgccatcccaggtccgcaacccggagaagcaaggtcagtggctcttgggaatctcatgacagcttttgtatctcaagcctctttttacctctgggccttatttaactacggagtctctgataattctttgttttgtgttttagaggtagaattcccataacagaaaattcaccattttaattatttttaagtggacagttcagtggcttttagtacatccacgatgtcatgtaaacgtcagcactatctaattccagaatgttttcatccccacaaaaagaaaccccatacccatgaagcagccactccccattccctcctcccctcccagctcctggcaacctctaatccacttaccatttctttggatttgcctctcctggacatttcatatagatgaaataatacaacacctggccttttgtgtctggcttctttcacttagcatgatgttttcaaagtttttcaatattgtcgtatgcatcaaaacgtcattactcgtatggctaaacgatattccattgtacggattgatcacattttgtttattcattcacctgtgatggacatttgggttgtttctaccttttagctgttacaaatagtacagctatgaggattcatgtacaagtttttatgtggacctatgtttttgtttctcgtgggcgtatacctaagattggaattgtcaggtcatatggtaactctatgttgaacgttttgaggaacagccaaactgtcttccacattggctgcacccttttacattccggccagcaatatatgagaggtccagctccttcacattctcgttaacacttaatattctctgctttttaaaaaattataagcgttctagtaggtgtgaagtggtatctgtggttcttcaattgcctgatgatgcaccttgatgcacaaaagttttaaattatgatgaaattcaatttattttttcttctgttgcttgtgctcttggtgtcatacctgagaaaccattgcctaacccaaagtcacagagatttactcctgtgtttccttttaagagtgttatagctcttacatgtaggactttgatccattttgaattatttttgtatatggtgtgaggtaggggtccaaactcattcttttgtacccatttgttccagcaccacttgctgaaaaatgcattctttacccattaggtgatcttgagactcctgttgcaaatcaactgaccacagaagagaggttcgtttccacactctcgattctgttccattggtctgtatatctatcttggagtcagtaccatattgttttgatcactgtagctttgtagtaagttttgaaataagaaagtgcgagtcctccaacttggtggttctttctcaagattgttttggctattttgggtcccgtgtaattccatgtgaatttgaagataagcttgtacatttcttttttaaaaggtagttggaattctggtagagattggatatgtagatcattttggggaatatttccacattaacaatattaagtcttccagtccataaacttgggatagttttctgtttatttagctcttctttaattttgtttagcagtgttttttgtagtgttgagtatataagtctttcgcctccttggtgaaagttgttcctaagtattttattatttttatgctattgcaaatggaatggttttcttaatttttcttttggattgtttatttctctggtaattcttgtacctttttaatcccttttacttaatgatcaatcatttatttaactagtctttattaagtaccaaactctgatctaggtaatggggttacaaccaggaaagaaaactggaataatcagcacatcttattttgtagttacccacaaaggtctataaacgcctgtctttgttctctgggtcgaatgcatagtaacgtttacagaatgtgctgggatcttgcttttctatgggcgagtttcctcaaggtttgctttcactgttccgtcgttccctgtgcccttttctgtgaagatgcagtctgcttcttggtcaccctgggagtgcgtgagaaccttcccctgccctggttcttttccagttctccataaacaatccaaaagcaaaattaaaaaaaccattccatttggaatagcacagttttaggagaaaagaagagtgttgacttgccttacgtggaaaattgactttaagtcatcaagtcatctacagggatctgggacctcccccagttgtattctttctggttttaaaatagtaaataactattttaagaaagcgttggctgggcgcggtggctcatgcctgtaatcccagcactttgggaggccgaggcgggtggatcacgaagtcaggagatcgagaccatcctggctaacacggtgaaaccccatctctactaaaaatccaaaaaaaaaaaaaaattagccaggcaaggtggcaggcacctgtagtcccagctcttagggaggctgaggcaggagaatggcttgaacccgggaggcggagcttacagtgagccgagatcgcaccactgcactccagcctgggtgacagagcgagactccgtctcaaaaaaaaaaaaagtgttataacaaatcctaaaagtacaaaaatgtaaaattttaaatgacctgaaatttacacattttaatagtggaagctcctaaattctttcttttaaaagccccaaagtgtattggccgagtattaaaagtcaaggtttactcctcatgccagctgcatcctcaagcattcactgcttcgtgggcacaaggcagagttctcatgccagcctgcatggcctgcttgcctgggaggctggtgctgtatgcaggagagcacatggaggctggggctactgctcttgtgtcctcatggcatagccctggaaaccgggcacaccattcaacactctagacctgtgatctttactctgtatcatgagccgaatacaacgagccctacccatgtcccagggcagctttgaggggacagtcaatcccccatggaactgtgcctctgcaggcagcctttctcatgcatctcacgcattcttctctttccccttcctattaggccaacatgcgtgcactgatgcctctcccctgagtccacatcccctccagccaccacccacttctctgctcccctttatggcaaagccggcagaacaagctgcctgccatggccatcactggctcactcccagcccactcccatccactgcacaaaataccggggctcgtcagggtcccccaccgtttccacattgcccaagcctatggtcccatctctgtcctccccaggttgttaaagccagggtctatggttctaacaaactaagcaccctctctggggaccacagggtgcagtggttaagactgggggctcaggagcccttctacctgggggtagatgctggctctaactcttacaaatacctgtgaccttggcaagtcacttagcttttctaggccttggtcttcttatctagaaaatggggatagtacgcaagttactgggttgcggtgggatgaaatcaggtaagacaggctggataccgagagcagggcccggcacacagcgacgttggcagctcaccccctctagaagtgccctcttgcacagctgcagtgatgccacacctgggggccctctccacctcacaggctgccccttgtgcatctcgttggctgatcctctcgcacatacccctgcacgcactcctgggtcctctgctctttgttcccatccagggatctcatccagccccgtgacactgagcaccttgtacctgctggtggtgcccaaagctgcctctccctgccctcttgcacccagacctgctctgcagcagcctcctgcttctgggcatgggtctaactggctctgagcttgtgcaccttagacaaactcccaaactgcctctttcttgctttccacattaatgtaaatagctttgggctgggcatggtggctcatgcctgtaattccagcactttgggaggccgaggcgggtgaatcacaaggtcaggagatcgagaccatcctggccaacatggtgaaaccccatctctactaacaatacaaaaagttaaccaggcatggtggcgggcacctgtagtcccagctacttgggaggctgagggaagagaatggtgtgaacctgggaggtggagcttgcagtgagctgagattgcgccactgcactccagcctggatgatagagcaagactccaactcaaaaaaaaaaaaaaaaaagcttcaccttgcactccattgcttggccaaatcccaggagtgaacctttaattcttctttgtctccttcaccatctgcttccagaatatatctcagtctgcccactgcctcagttcagtcccctatagtgtcttacctcctcattccactggcccccctgcctcaacccctactggctagagccactctccacccagcatccaatgatccttttaaaatataattcagaaaatgatgcacccctgctaactttaatgacctcccacagctcttagagcaaaacccaaatctcttagcctgacctgcacatcctgctagcacctctccaccgtgaatcatttcctgcgcctcatcattgacctccgttctgttcccctaacatgcctggtcttacctccatggggccttggcacgtgctgctccctccttggggacagctgtccctagggcttcccatggctgcagctcagacctggcctcatggaggggtcttatctgaatgcctgtggtggatgtcctacccactctcccaccttacactcctacagaaacataaaggcaggggatgagaatggggaggaataaaaatttgctgagattctgattccacatttagtgggaggggtgatggattatgtcttactcttagcactgatagagacatataaactcaaatatcttcctataatagagagataatcaagatttaaaacaggatgccaaccttccagatcactagagggaaataagagtgaagagaaattgatcaatatgccaaaaaaaaaaaaaaaagagagagaaagaactataggcaaatttgaatagggatacggaagtcttaaataaaacattaggaagtggaattcatcagtttattcaaagaatactcccctccaagaacacagccttcactcaacagatacttattgagcatttaccaagttctaagcactggggatgcactggtgaacaaaacagatgctaagcttacattctggaaggcagaggaggccgtgaaacaagattaccaggcaggaagctgttgtccattagatgatgagaagctctaaggagaaaaatgaagcagggcagggtgacaagggcatttcagggtgtaccgggaaggcctcagggaagggacatttgagtaaagctcaaagaagatgagggggtgagctctgcagacatctgggaaaagggcattccaagcaaagcgttcaggggatgctgaggcccccgggcaggagtgtgcctggtgtgttccaggggatgctaaggcccccgggcaggagtgtgcctggtgtgttccaggggatgctaaggcccctgggcaggagtgtgcctggtgtgttccaggggatgctaaggcccccgggcaggagtgtgcctggtgtgttccaggggatgctaaggcccccgggcaggagtgtgtctggtgtgttccaggggatgctaaggcccccgggcaggagtgtgtctggtgtgttccaggcacagcagagaggcccccgaggctgcagggggcagtgggaagaggagcagaataggacaggaccaggcattgagagcatagggaccagatcgcactgggctttgtcagccctcacagggacttggttggaagtcactgagagattttaggcagaggacagaggtgatctgaacttctgtgttaataggctgacagctggtcagaatagacggaagtgagggtgggagaggaacaaaggcggggaagccagttagaaggtcattgcaatatcaggtgaaggtgactccgacggggcagcatcagtggagtgtatgaagcagtcagattctgaaagcagggtcgagagatgtgtagatggatcagatgtgggctgtgagaggagagagggggcatggatgacttcagagtttttgtcctgcacagtagaagaatggagtcctagtttcctagatctggaacattgcagggggggaagatgctggagagaagatcaggagcttggatttgggtgggttaaatcaaagatacttacacaagtccaggcagagatatgtacctggaggtgagagggaagactgagctagaaatccaaattcggattaggtatattaagtatcgtcagcctttcaagctgtatgagcaatggaaggagatctgtttatataacagtgattcacacgtttggagcctgttgcgtgtgggtgctgagcgagctttaggcttgcagtggtgcacagcacggaaccgcatgccctgcacacctgtgcacctgccacactgcttcctgcccagccagatgctgccatatcagctccctgcttgctgcctgcatggcactcagcagctctggccttggccttagcactgatgggcttgccatctgcagccttccttccttccggtcctgctgtgccctgagagcctcctgctgcatggtgtatgataggtgcccaataggtgttggcggattaattagtccagttggaaccctctgtaaccaccacatgaccagatgctctgtgtgctacagaggacacaggattagtggatacaagaaatacttcctgagggtagccccaaatgaagtcttgacacaggtcgatctccacccctcagcgtgggtagaaactggatctttgctttcagaaggttgagacgggtgcagaataaacaccttgtggtaccttccagctctgaccttctagggcctactggaatttggggggcggggacacattctccagtgtcatcacagagagtatgcacattcctgcaagggcgtctggagtcagttcattccatgcaagctttaccctgtagacaactgccactcctgaatgtggtccagaaacagcaagtacaggcatgcgtcctgccacagctgacgcacggcaagccctccctgctgtgtgtggggaggacgggcgccttcctgtcacccacaggctctgtgcatcctccccaagcacagtgagagctagcctgggagcctgggtcccaccagcatctctccacagtggaaatccatgtggccctcacatgggacactgcagttgcaactgagtctccccaacctgccctgctcacttcattccagggccagcctctgagcttgttgttcagcatggcggctggatcctcccagggtgagggaagggagtgatggagtgaagccaaaaggggtcagaggggctcaaacaaaggccaagcggccctttccaggttggcgtatgggcccagtgcttttgaggttgatccaggataagccctcttcagcctccagatgaatggtacctcttccggctgttcctgaaatgtcaaaatgggaggtctgcgtatcctaacagacatgtctccgatgcattttgcagaggtcctgccatgtgccagatgctatgccagtgctcgggcacagagaggctccaagacacagttcctgcccctgaggagcccacaggctagttgggaacatttcggatttcaggaaccaatagtaccatgcacaagggcccaagggccaccagtgacccagaggagtgccccaagttcagtggagcaaacagggatttccggctgaaagaaacaaggaagggcttgtgaggaagggtctgcctaaggccagattctcaggagttccccagtgtcactttgtttttttttatcttagtagcatagaaaatacaggccattaggagatggcgactgccccaagggtacggctgtccttttgtagaatgaagtgccaggcattgcccacatatgacctgccttactccgcctacccccaggggtgagacttctcagggctggccttgctccccaggccctgggagggaccacagaggggctcagcagtgacgagccaggcttccccacccgatccactgggcaagcgacggggatgtcaggccgagacagtcctcagcgatgacctgccctaactcccctccttccaggggcaggtctgggcccttccatgagtgcagagcagaggtgggagcttcctggccaggccgacataaggaaagggcctgctgcctctgggaggatgctctggtgcccacagaaggcgtcagtgtggatgggggcctgcagtggacgggcattgaggtgtggaggagagtctgagaagatctctatcaaccaccagagagccaggaagcaccccctaggaggaagggtgaaaatccgtgtctacccagagctcaccaaggcactggttatgctgtgcccaaagacccgggacccaacgtaggcattgttcgcaataagacctacccccagagcatgcctgtgaggccacgccaggtgggcaggacggccgctggccgaggcttctcatcagtgcatgggtggagagggaagcccagcctgcctgcacgctatgacgctattgtgtacacagggaggcaggaccagccccagcactgaatgttcaggtcaagctgatagtgcctgttggggacctcagcctgggaaggtgacagagaagacctaggttgccctctagctccaggattcagagctctagaggccgggaaaatgcagggctggtcagccaggaaaatgcaggtctggtcagcatcgtcagcatcgagtcagctgcctgtcagcctcgtcgatgccgaggtatgaactgatctcaaatgggcaggatcttccactccctggttgtctggtgagggtggcctgtgagtgcacagtcaccaccagcctcagtgccaggcacagtgcagcacacacacacgcgtagaccagaaaagcaggcagtcctcacttctctacaggcattccaagaacctgtgcttggggcagggtgcttcgtttctgtggtgttcatttcaatctcctgcaaatctctgcaagttaattgctttaaaagaaaatgaaaagaaaaaaactgctccaatggtgttctgtgtaaaagtgctttaaaatctatgctaagacccaggatttatgaagtaattaagtgatctgactgatgcgctagctccaataatacctcctgtcagattgaacgtggcttaggtaattagttttaaagccatttttaaaggttgagtagcacatcagtcatccattttcctcttcagttcccaggccaaggatctgggtcctcccaggatcactctcttccaggaggcaatttaggaatggaatcgagtgtgaatcctgctttgcagtcttgcagcatttgcagatactaacagctcttcatttattcctgcacacctatattatttatttatttatttatttatttatttatttatttatttattttgagacagtctcgctctgttgcccaggctggagtgcaacggcgcaatctcggctcactgcaacctctgcctcccaggtttaagcgattcttctgcctcagcctcccaagtagctgggattacaggcatctgccaccacatctggctaatttttttttttttttttttttttttgtagttttagtagagacagggttttgccatgttggccgggctggtcttgaactcctgacctcaggtgatctgcccacctcggcctccgaaagtgctgcaattacagggtgagccactgcacccagcccagcacacctttattgaactctacttagctccagatttgggaacactaggaccttgcccctgcagtgcacagtgtgggtgtggaagagggggcagcttccaccgtgggtgagcttgctactccagccgttacgcacagagcctgcaaggctacgaacggagctggcaacggtgcaggcagagctggggcgatggctcgtcctgcagaacatctgtcggagaagtttggctgcatttaagagagttgccatccaaaatgcccgagattttaagtttggacccagaatgcagaaagtgtctattctctgagaaacatgtatgcttcattctcccacgtcagacatcagacaggcctggggttggatcctcctgcctccgcttttcctgtctctctggcctctgcgctgggtctcctctcctgtaagatagggctgtgcagaagtgagacccagaccaagtcactgaagagaggagccttcccagcccgcccttcttgcctcggagcctacgttggtggttgcacctgaacgacaaggcagagcctgtgcacctgccaaggtcaggccagcctccccacccagggccacatcccgctcggcaccctcaggtgcaggaaggtccctgcacctcctcatgacctggggcccccatgggcatgccggatgcatgcaaagtgctctgcaggaatcgagcttggctttgtcagcactaaggggcatctgcatggtgttctcctgttcatgcagcacacacttaccttgtctgcacacctgccccatgccgggtctgctgggtaggcatgggtgtgaggggtgtttccttgttcttcacttcttccaccccaagagcccagctgagtgtgccctgcaggcagtttgaccagggctatgtacagggcccaaactttactgagttggcctagccctccctttgtaaccaggagcctacctaaggtgctggggcacctcccacagtcttcccctgccagggagaattgtgagacatcaatgtctaaatagaaaaaataatcaggcatgctttccaatcttctctctataattgacaccatgtatcttatttcatggttccaaagggttttacgtacttggtattcacatagtaataaatagactgtctgagacaattgatggcactttaaaaaatcctgtgtcactcttgaactctgagaattcactttctccctgattaaaatttcttttttctctgatctttcatctgtttccaaaagagcagcaacccacatgtgctgtgtttttccagattatttcaacagcattatttccagattcccaccaatctaggaaagaagtccaatttatcaaaagaacgagagaggaataggatgatgattagcacctacgtgttctccagcaggcactgggtgctattttatctcgctgttacaaatcagtatagaatcagggtagatgataataaggaattaaagtttcaggaaaagttattcttgctagtgatgcatatcatggtatttacaaatgaagacatgaccacgatgcctatgatttgtgctttaaactattccagagggtgggggtgaggagtgggagagtaggaagagggtgggcgaaaccagattgagaaaaggttggggattcttgggactgtgtgatggggcacggggactcattgtactgttttctccattttatgtttatttgagaatttccattacgtgaagagtttttaaaagcacatgtatgggaaacatttcttccgaagaggtcagaatgcaagactgtctgagagatttacatggcacaagtaaatttaacgatgtaaagatttcattgctttacagcaaatacacttcagttcttcacttgtgaggagtaaatgctcaatgtgccgtgggacacgtagagacagggattttacactttgtttaaagtgtaaaaagacacgtagtttcttttacgtttgactgaaggtgctctagacagttactggacgtgtgtatgggagtgtgtgcttgggtgtatatatgtgtgcatgtgtgagggagagtattgtgtataagtatgtatgtgtgtatgtgggcttgtatgtatctgtgtgtccatgtgcatgtctatgtggatatgtatgtgtgtatatgtgggcattaggtatatgtgtatacttgtacatgtatctgtgtgtgtgtgcatgtggatatgtgggtgtgtgtatgtgtgtggtgcatattggcttatgcttccttttcaagacccagtgtaacacaaggctgagctctagagcggcctgcttctcagatccatcttccaccactggtcattgcggacctcggcaggccatttccatgctccgagcctccaacctgtcctctgcccagggatggtgggaggattaaacgaaacagtgcccgagaagtgctgagccttaccagcatgaacatgattctcttattgtgagtgtttagattctccttttgtggaagagggagctgagtccaagctcctccacccagagcctgactgagctcacctgcctggaaggggcagagcctggtgtcagggccgtcttccaagctcagggccaccctcacctcaacccaacctggtgaggtctccacgcctctccaaggcagtacaggcagcccatagttgatctgatctctttagccctgtggccagtggttttcatgtgtctggcttcaggatatttctggttggatttttttgtttaaagtgttgtaattagaagataaaaattaaatgaaatattaaaagctgggagcctctgctgggtgccagccagggtcggggtgttgaggaatgttgctgctgagaggctgcctcacttggctgaaatccaagagagcagcaggccttctgagaacttgctttgaccagtccacaagagcaggggtccccatcccacctaccggtccatggtccatggactgttagggactagactacacagcaggaggtgagcggccagcaaacacttcatgtgtgtttacagctgctccctgtcactcccacttctgcctgaactctacctcctgtcacatcggcaaaggcactagattctcataggagtgcgaaccccattgtgaactgcacgtgccagggatctaggttgcacgctccttatgagaatctaatgcctgatgatctgtcactgtctcccatcacccccagacgggaccgtctagtcgcagggaaagaagctcagggctcccactgattctacattatgatgagttgtatagttatttccttatgttttacaatgtaataatgatagaaataaagtacacaatgattgtcatgtgcttgaatcaccccgaaaccatccccactgctccccaccggatccccagctgtggaagaattgtcttccaataaactgattccttgtgccaaaaaggttgggaaccactgcagtagaacatttgaaatgcaataggtacttggaatagatgcttggttttaagggtttttcctatagactatgttcctgaatgggaggattcagtatcactgagatatctcttcttcacaaagaagggttagccgtcactttaacacagtcctcatcaacatcgcaacaaaattaaaggaatgcaaggaaaacctattctgaaagaatgggcacagataatagctagagaaattctgaaaaaatgaatgcaggtgtttaactgtgttttttaactataataaaatgatctggcactggtgctggaatagaccgatcaagggaacagtacggatagtccgttaataaagccacagagatatgctaaggatagcgttttaaactggtgggaaaagactgaagtgttgaataagagttattgataattggccaaccatttggaaagaaaataattatcttgatgcatacacataaaattagaaatttctgtctggcagaaaacatcataaaattagaaaaatattcctgtaatctcagcactttgggaggccaaggcaggtggatcacgaggtcaggagatccaagaccatcctggctaacacggtgaaaccccgtctctactaaaaatacaaaaaattagccgggcgcagtggcggccacctgtagtcccagctactcaggaggctgaggcaggagaatggcatgaacccgggaggcagagcttgcagtgagctgagattgcaccactgcactccagcctgggcgacagagtgagaccccgtctgtaaaaaaaaaaaaaaaaaaaaaaaaaaattagaaaaatatttataaaatattttggacaaactcaagtgattcacagatggccttttcacttctgtctagcccatgggttggaaaactttttctgtaaagggtcagatagtaaatgtttgaggttttctggtctctgagacaactactcaactctcccattatagtgtaaaacagccatggaaattatgtaaatgagaggccgtgctgtgttctgacctcactttataaaataggcggtaggtcctggccttagtttgctgtccccactctgccctgtttacatgttcagttgaattgagtcttctgtttcatggtagttaagagggctgtttatttggctgttatatgaggcatcccatcctgtccccattttcccaccacccatgaagttatattgtcctgcttgctggtaaatatttaacaactagtgctctgggggaaattatttatagatattgacatatcacataagttcattataaattttactgatataaaggatgttagccaacaatttacaaataataaaatatacattgcttgtattataaattccatttagccagttgattctcagagactgctttcattgatttttgccgaattctggttccataaccagccgatggctgccatgcatgaacagttgtctttccagcgtaaatattgggtaatatttttgccacagaaacaacaaagacatatgtcagaacttcattcactcaccagggatgggaacaacttccttgctaaattggaaaataattttcaaatactgaaagaatatctcttcagttttgtaagctgttcacagtgtaatacctacagacatgaaacatttttaagttatacctgcagtattaatgctttctccatcactttcttaagcccagaaaatcaacagtaaacccagcccttgtttgtagcatttgtcgatttccatatgggaatatcccgccatggccaatttcaagcttttcacgtgacgtcactgaagacgggttggtaaaagaggggtccagtagccaccatgagatagtgcttcccctgtgtagatagaacagatgtgagtaaccctgaagcacagataatgacaaaatatagtgagatcatgaggaaggggcaatttgtgaatattcattacctttgtttttagtataatttattcaattgtaagcttctataatttaatgtttaataaagactgtgtttaacaaccagctcacaaaggttctgaaaatgttcacaatcagttccgttaagccagtgctggtcggctgcagcgcaccactgcatattgggaattgaacgggtagagggttgtctttctcttgggacaagcacactttaaggggagcgtattcattgcaggaccaaggctcaacgtgcactgctccccacccgtcccagctcctctttatgcttgcgggggccagccactctccagtcctccccaggaatatacgtcgcaaccaggcattcttttttcattggcctcattcttcccagggccggctcagaggccccccggtctaattgccattggtttaactgctgtttaataaatcaaactatttttctgactaaatcttgctaatcagtaaatagtgatcatctgaattctccatatgctaaaaagtcatttttccaaggggtaaaattaaagtaatatttggcataaaaaaattctaatacacaggcagacacctttatgtctaatatctcaactgtagaggttagataatcacagagtgctatactgtgttatagccttaaaatgtagagtgcttacagatcactaagaaatatttaaataatatcactaaataggccaaaatcctgaaaagcaattcgtaaagaaaacatacaaataaccagtaaacacaagatagtcaacatttgtagtatccaaataaaatataaactaaaggccaggtgcgttgtctcacgcctataatcccagcactttgagaggccaaggcaggtggatcacgaggtcaggagttggagaccagtctggccaacgtggtgaaaccctatctctataaaaatacaaaaattagccgggcatggtggcgtgcacctgtagtctcagctactcgggaggctgaggcaggagaattgcttgaaccagggaggtggaggttgcagtgagccgagattgtgccactgcactccagcctgggcaacagagactccgtctcagaaaaaataaaaataaaaaaaataaacgaaaacacaagaaggcaaaatcatgatagaaagccaacaagcagcagttgcagagatggtagaacaaatgtgtgaaacgaatctgtatggcactctgcactcggggccacagagtgatgtgatttaaagaacgggaatgcaggggcagaggagcctgggtcccacgctggctgcaccggtgacgggctgggagacctgggactgatgactccctcatcagcgtcttaccagcacctggtggacatgaaatttctcacgcagcctgtgtaggttgtcacagaagcccaggctcctctcccctctccctacctgccactgcaagtgtgtgttttaccacagcctttaggaattggtccatttgctctctgggaaaattccagcctggagaagctggtagagacctgcctccatgcctctgaggaaaatcaaattggctgcgacctctacagaacccaggaatttggaattcactgaatccagggttgctgcgctggaggcaaagctgggctgctattgggttggctggccctaagggaaaactcttctgacttttgaactcagcaggtacatttctattcttcctttcttcttcttaagcaacacttttcccgagaaaaacaaacaaaactttgctaaccaaaagctttgtgttgaaactgccaggaggagatgataagccaagcattgccttggctcctcaggacttttgcaggcccccggggcagagccattcaggaagttcccacagggcttggctttctttggagctcagcccagtgcacctgactctaccctgtgcttctgtggaatcccagctttggttctgtccttcccagaaacctgaaagttgaagccaagacaggatcaaggaaggtctagtcagaactgtggtgcttttgccaaaacttgcagaataagctatcggggcacagatcagttacgaaaaccaaatctgacccgttatccaggcgacttgagtgagaggagcaggagggtggcgggaggagaccaggctgccgcagacactggagctcctgaacgggatttggacctcagggtggtgtttagggagagcccagagcagagcagctggcaggcgtggtctgagttcagctggccgcttcctggcctggtcacggaatctctcagtctctgtttctgcacgtgtgtgatgggaataatagtgtctacttcaacgggcctggggagattcaaatggaggaaggtttcatatgaacaaatcctttatgaggagtttcaaaggtttcaggattacaatctttgtccatagtgcctataacatcagaaacaccaagaagtgtttcttgatattgagcttccttgaagccaattacacatgtcagttacatatcgaattctgtgttctgccttgtgctgtgacggtgtctcacgaaggtgctgctatacctttggaagactccagaaagcccagggaagcaggttcttttcaaacatgatagttcacacttcatacctcgaagcatgtattttgatgacgttttactccgcaaatgtcacactggccccactgcgtgtctccccagactggcccagccctgctgtcgtcaggccttgcctgttgcccagtaaagagatctagccctcacttccttgcctcggctcccccagcctcccccacggtgaagcctgggcgttggaatggctgctgacgttcccaccggggaggagcagcggaggcgcaggggccggtccgacccagcgggaccccgggggggcgggggttgtggcttttccctccacttccaggtgaggcttggtatcaggcctccccagcatctggctgcctggagggggcaggtaacacaacccagaaggaaggtttacccaaggaaagacaggacataaagtgtatgcccttcctgtctgagggcacattggtctcacaaggcctgtttggaagacttcccccagctaagcaaccaccccgtttctttgtggagctgcagccagcttgaaacacagctccttccatttgtcaaccccgggcgcttcctcctgctgccctccactcctgttgccctgggattgcacctcccaataaagcttcagcccatgggcttcacttcagtcccttgttttccagggaacctggactaaaacacgtgttccggtggcagattgaacaagagctttggtaatctctgtgaaatactgcagagggacagatgaccaaagccaccacatttagaactttggctgcctttggaagtccagagctggatctctcagctcccgcccccagaggctcagcactttggacatggctcacaaacagttgttgattgactgcatgaatgcgtgtgcgtgcaagcatgaaccttgtttaaatcaagagcttacataattttaaccagttctgtcttcagctgtacatactcagtaaaatgtttaatgaaggggaagagattagtctcttctgtgtgaccatgttttccctttattcatcctaaaaagttccatgaattcttgatttcctttcagtggccctttcaacaatgtcttttttcccaagagcataactgttctcattttattgctagccatcttgatctgtgttttattgacatctcttttgagctaatcttcatttctaagataagagttgagattttgcaatctgtgttcgatggctcaatctatcctgtgcttgatgctagaaaggaagacagatttaaagcacatgccttctgtgccggctttcaagtttgtcactaaactctcatttctggaaagtgcaattatagagtatcactcccacttccttggaaacagagctgaagaacttggcacactctccaaacagtcaccatacacactgttgtcaaaaagttccatttttaaccccatttgcattaatattgcagtcaatctctttacctccttttctctttcacggggccgtgacagtgacgcctttccccaaaactctcctcgtttgagaaaaaaagaagtatgtatccccacttatctcggggagaaatgcaaccaactgctgctgtgcacatttatgaatcacagtattgtttagtcggttctgtatctccagtagaaagcataacaaaaagatgacctttgtctcacctcatagctaatttttgcaaataaaatactaaacattgatgaaaatgaaaatgacagatctgaggaagagggagagctctcttgaaacccctttcccagatttgccctcagttttaggaatgaggtacgcttgggcattcctgttgcctgcatggttcggcattctggcagccaggttcgccccagaatagataagtgtgtttgattttcgaacatttgactttattacctatttccagaaacacttcgtgttcaaactacgtctctacaggcatttctacttggtctttttctcccctgacatttcacagagtcctaactgtgctgcatgtataacttgttctttctttttgttacttgcatagcaagcatgtttctatgtcattaaatatcctttgtaagcagcattttatagatttttataatacttcaccaacagaagcaccataatttatttaagcatctctctattgttggacatgtagattgctttccattttttcctattatgagcggacagcttagtacaaaaagccttctcctgaatttaaaattatttctttgggattattcaccagaagtaaaattactgggataaataagaggtggaaaccacaaatatgcctgcctttgatacatattgccaatttgcttttcgaaatagttgaactgatttgtagtcttaccaggagtgggcagttctggaggaggtagatgatacccttccttaacttacattgtgatcattactaacaaaggtgaaccttttttcaaatgtttgtgcactgtgttttttcttttgaaaattgccctttctggcgtggtggctcacgcttgtaatcccagcactttgggaggccgaggcaggcggatcacctgaggtcaggagtttgagaccagcctggccaacagggtgaaaccccgcctctaccaaaaatacaaaaattagccggtcatggtggtgggtgcctataatcccagctactcaggaggctgaggcaggagaatcacttgaacccgggaggcggaggttgcagtgagccgagattttgccacctcactccagcctggatgacagaacgagactccgtctcaaaaaaaagaaaaaagaaaattcccttttgtctttcgcgagagcgctcagtgttgctatcaagctgataagtatgtagtctgtgtaaaatattggtaaaatattggtgtaataaccctgtgtgtgtcgtaattcatataaattttttttctggcctgctgtttcacttttgactttttaaaaataattttaaatttcccctccagagttttgataattatttccttttttaaaaaagtcccaatttgtttgattttattttcttcataatctgtttgcctttttttcagtctaaatattagtgtctctaaaaaataaataaaagatatataaaactttttctaagttgctaacaaattactccaaaacaaagtcaagatcaaaatgttaaaagatgtcgtggacttttatttccaacaacagagaagacaagtgtcttgaaatctccctcccacagaaaagaattttaaatgttggttgaaatgttcacagccaaagaggtgaacagaatcatggtccggcttttgcttgaaggcatctgcttcatctgtggagcccacctagcagaccacataacactgggacctcaggggcacccaaggaaaggagacacagacaaagctgtgtaactagaacccacaaaacaagtgcttacaaacaagtccaataacttcagtagtttcactaaaggcatacagactcgttgctccccttgagagacaaaaattgtcatattggatttttttaaaaaatgtatttaaaaatgtatttgggaggctgaggtgggcggatcacttgaagtcaggcattcaagagcagcctggcctacatggtgaaacctcgtctctactaaaaatacaaaaattagccgcatgtggtggtgtgtgcctaatagtagtcccagctactcaagaggctgaggcaggaggatcactggaacctagaaggcagaggttggaatgagccaagttcatgccagtgccctccagcctgggcgacagtgagactccatctcaaaaaatacaaattaaaaaaaagtattttctgtagtgccaggtatatttcatttacccaccagatccattctccactcctccaccccacagactcccttgcctgtggcttatagttgagttcagccaaggggaaactccagcaggagaggagggagggaggagatatttatttatgagttagtgattctccagtccttcatcagccaaacagaaatgttatggcaaaaagcgttattggagcttcatatgtagctctgtgtatgtatcaatatgtagagggtctatacatattggtaaaaggtttagttcagttctaaaagttccacctctaatcttttatgcaatttataacacagccttaaaatacatatagagcaaaaacttgttaaaactacaaagagaaaatgacaaactcacacaggagggagagatttagcatacctcggatatatttgatagataaaacagcaaaaattcataataatagaagatgcaaatatctcaattgacaatttaggtcaaatggacatattggaacactgtgccaaacaacagaataatacaccaaattttttatttatttatttttttttttgagacagaatcttgttctgtcgcacaggctggagtgcagtgacgcaatctcggctcactgcaacctccgcctcccacatacaagtgattctcctgcctcagcctcctgagtagctgggactacaggtgtgtgcctatattttgtatttttagtagagacagggtttcaccgtgttggccaggctggtctcgaactcctgatccgtgatctgcccgccttggcctcccaaagtgctgggattacaggcatgagccaccgcgcccggccaatacacccacttttcaaacacgaatggaagatttatgaaaattggccacatgtcgagccatttggcaagcttcgatggatttccaaggattggtagcatataaaccctattctctgacattacacttaagttagaaatcaaaatcaaaaagataattagaaagtttccatacatttgaaaattgaaaaatacttctaaataatttatgtgttaaaagaaaaaaacataatttatattagaaaatacttaaaactggatgataataaaaatactacatattcaaataaggaagatacagctaaagctgtagttagacaactttatggctgtaattgcatatatcagaaaagagaaaatcctgaaaattaatgtgctaagcatccaacttaagatgatagaaaaaaaccaacaacataaagaatgaagaaagaaggaatttttaaaatagcagaaattaacaaaatagaaaacaaacatatgtagagaaaattaaaatgccataagctggttcttgaaagaaactaataaaattgataaacttgtaagtagaccaaggaaaaagctgaaactatatgatttcaggaaagaaaaacgcatgattatagatcctatatacattaaaattatgtgacaaaggaattctaagtgaaatgaacaaattccaagaaaaaatacaacttaacaaaattgacacgtttacataaaattaaaattgtcctattaaagaaattgattctataatttaaaagaaaactcaaggccagagcaatttaccagcaaattctgccaaacatttaaatggaagaaataatgtcagtgttctgtaaattcttctagatagtagaaaaatagggaaacagtccccactttgttgaatgaagccagagtttggttttttttttttttgagacggagtctcactctgttgcccaggctggagtgcagtggtgcaatctcagcccactgtaacttctgcctcccagattcaaacgattctcctgccttagtctcccaagtagctgggattacaggcatgcgccaccacacccagctaatttgtgtacttttagcagagacagggttttgccatgttggccaggctggtctccaactcccaacctcagatgatccacccgcctcagcctcccaaagtgctgggattacaggcgtgagccaccgtgcccagctgaagccagtgtattcttgataccaaatcccaagagcacatatgagaatggagaattttcagccaatctcactcaagaacataaatacaaaaattctaagcccaatatcaagaaaactaaatccaacagtattaaaaagatgaaatactctgttcctcttttcctgccttgttttagattaatcaaatatttgtcagcattccactttatctcctctattggctttttagctgtactttgagtggtgctctagggattacaatatgcatccttaatttattacactttacttagaattaatattgaacagctttacacttctcagataaaaggatctaataacagtgtaattccatccccctccacttcctcatttgtgctgtaatggtgttgtatattttacttctgtatttgttacaaactccttcttaaaacagtgatattactttttgctttaagcaatcttcttttttttttttttttttttttttgagacagggtcttactctgtttcccaggctggagtacagtggcacaatgtcagctcactgcaacctccacctcccaggttcaagcaattctcctgcttcagcctcccaagtagctgggattacaggcatgcaccaccgcgcccggctaatttttgtattttcagtagagacaggttttcgccatgttggccggactggtcttgaactcctgacctcaagtgacccatacaccttggcctcccaaaatgctgggattataagggtgttgtcttttaaataaattaagggaaacagctactcttcagtgtgtttactgacatgcttaccatttctagtgctctttattctttcctgtagatctgaattttcatctgctatcatttcccttagcctgaaacacatcctttaccatttcttatcaaactgggcttctggcaaggactttgctcagctttgttttctttgaaaatgtctttacttcaacccatttttgaatggtattttcactggatatagaattctgggttgggagtatttattccagcactttaaaaataccaaatttttaggccgggcatggggactcatgcctgtaatcccagcactttgggaggccaaggtggccagatcacctgaggtgaggagttcaagaccagtgtggccaacatggtaaaacctcatctctactaaaaatacaaaaattagccaggcgtggtggcaggcgcctgtaatcccaactactaatcctaactacttgggaggctgaggcaggaggatcacttgaatccaggaggcagaggttgcagtgagccgagattgcaccactgcactccagcctggataacagagcaagactttgtcaagaaaaaaaaaaaaaaaaaccccacacttttggccaggcgcggtgcggctcacacctgtaatcctagcactttgggaggctgagacaggtggatcacctgaggttcggagttcaagaccagcctggccaacatggtgaaaccctgtctctactaaaaatacaaaatttagctgggtgtggtggtggcatctgtaatcccagctactcgggaggctgaggcaggagaatcgcttgatcctgggaggcggaggttgcagtgagctgagattgcaccactacactccagcctgggtgactctgtctcaaaaaaaaaaaaaaaaaatttgggagaagcacataaatgccttaaaattaaaaatataagtcaaaaattcaaaattcaatagatatgttagaagataaacttgaggaaatctcccagaaaatgaaagggtggtgggggaaagacaataaatattggacccagtaagaaattttgttagaacattgggaggtgggggcgggagagggatcatgtgagtatgtggaagatagtgtaagagaactgaattctcagcttcctaggtgagacatcactggacaatgtctaacatcaagaaaccaggacatagcatatgagtatttttgtctagcaatgtaagggcaaatgccagaaaaataactcaaagtgttaaaaagaggtggggagtcagggggactccaagaggtagaatggagtgaaggaggactgctttctttgttataaaccttgtaagagtttttgactttccagacatttaatttattactttggaaaagctggagcatcttaaaagatagaatgaccttatagatgccattaagaaaagtgctgtgttgtccattgtacacacaggtgatcattctttcccgaaaggatatttgtttaggattcttcgatccttttcctggcatttaaaataccatctttcagggtttttgtggctataggagcacagggaagccttgtatctcccctttcttagcctgggtctgagagttcatgtgtgtatgtgtgtgtgctcaggtaagtacgtgagtgtgggtgtgcatgttatgggtgccttgtgcacacatgtccatgtgcatccatggacgtgtgtgtacatggggagcacacatatatgtactctttttcttatcctcctttccaagccattcctaaattcctttttacctttctcttacttgccataatgtgaacttaaagtgtattttaataatgtgtttattgagtaaaggttgatatttctgtttgtgtgtgtatacatatacatacaatatacacaaaaaattactgtgtgtatgtgtaattttatatatatatatatatatatattgagaaagggtcttgctctgtcacccaggctggaatgtagtgtgcaatcacggctcactgcagcctccaactcttgggctctagcaatcctcccaactcagcctcctgaatggataggactacaaggacacaccaccacgcctggctaatttttctattttattttttgtagaaacggagtctcactatgttgccaggctggtctcgaactcctggcctcaagagatcctcccacatcagcctcccaaagctctgcgatcacaagcgtgagctactgtgcctggcccctacacggtatttttaataatagctttattgagatataattcacatactgtgaaattcaccccttttaaggagtaaattataggagtattcagtatgtgaattataggggtgtttttgtatatttttataaatggatggaagtaagcttttttattccttccgcccaaacctctgcattaacctttgtaacttgaacatagccatgggtggctggttcaccaaatctcagaaggaagaaacttccactggtgttttaaactgaaacatatttacgtgatttttctagggctctcttacttcactgtgtttcaattaaggaatttcttcctgcatattttaagtatggggacatagggggagaattaattaaactctatattgttaataacttctcctatagccaggaaaacccaggaatccaaaagtattagctcagagtccttaatctaatagaactttcccccacccctacttgctttgtctccaattgtaaatttccttcacaaggattttaatgcttaactcaaaatgccaggcataggaaagcttcattattgctggtactttcctgttggcaaattcaaccatagtctccccttaattctggttctttctttgcataatgggaataatcctgtttgttcattatgaatttaattcattgaggggaaatactgcattgaagatagtgaatgatgataaatccatttactggcagcctcagttggcactagctgtggattatcctctgcctctcacaatgacattccctggccttcattgttgacatctggaggcagcctgctggcagtgctggcccaagtgtttaaacaggtggatttgtgattcttctacaggctcaggaatctgatggcaaaaaatttgattgggcatcttttaagaccccctccttttagaaactaaggaactcatggtgctagttgggtatgtacaacagtaaacttgaacaggcttgtagagtatcttgaatagtaaataacacattcttgctaagtggtttgccgaaagcagggtcaacattctaaaatctgactgcctctgggtggcagttctgttgagtgtagaccctggtctggcctgggttgtccctggacacatctgcctgttcttcctccttgcttctcctgcacccatgtggcttaccttcccaaagagaatgtggcctcttgggggtgactgagtgtggaggggccggcctggggagcctgtcctggcacaagtgctgctgctgtggggggccgacactgtggacgcaatgagaggaggtggatgcctcctgaaaactaaagcctccaagaagctcattcctgtgtgtctctgccttagtctgttatcctaagtcacccataagcatctgactctcctgcctcagttaagcttgggctgtggtttggagaagggactgtgtagagggggtgattcttatcaagtaactgatttgcccaggtggcctgtggtccctcgcctgggtattttgcagtcaagcctcatgggacaccaaacactgtggcgggatcatgtggcattgccgttcatgatagacataagtttacagttcaagataagacattaacgtgttgtatcacctgacccagtggttccactttcgggactctattgggaaaaagtaatccagactgcatcaagtaatatttctgtcagatttatgtatttcaaaaaagggaactggactaaacgttctgtcataacctatcataagaggttgttaaacaaatggtcacgttcacagggtgaagtattttgctgtaaaaaaaaatgttttaacagattcattcattcagcaaacatttattgagtacctactgtgtgcccaaaagttgctacacactgaagctaatgcaccaaacaagagagacatgttccctgcccccgtgatgcctctaggctgaaggaagagaaaacagtgaacaagaaaataaataacgtcgaatgcgattaacatgatataatgctaagtggaaaaagaaagagaaaacagggtgctgtgtgttttcaactatgcaagaaatacacatgcataggaaagagcccaggaggaaatatgccaaaagagttataggtgatttatttttatttttctttaaatatctcaacatttaataatttttattctaactagggaaaaagtaattttaaaaaagaatcactcttcaaatttatgccatacactttatgccataggtatggaattctcatttttacgtcttccaaaggcaggaaaaccaaagtgactcccttggttgagaaagtgaaaaaagcatttaagtactagaaaggggagataggccaggtgcagtggctcatgcctgtaatcccagcactttgggaggcacgcggatcacaaggtcaagagaccaagaccatcctggcaaacattctgaaaccccatctctactaaaaatacaaaaattagccgggcatggtggcgggcgcctgtagtcccagctactcaggaggctgaggcaggagaatggcgtgaacccaggaggcggagcttgcagtgagctgagatggtgccactgcactccagccgggcaacagagcgagacaccatctaaaaaaaaaaaaagagagagagagataaatgtctcccagattaccattgtctaaacctaaccttaggtcaagtgtcacaaatcgcacctattagaaaaggaaaggtctcttttggaggcacatgcaggaaggggttgctttggtcccactgcttcttccctgctggcgtttttggagctcccagctctcagctccgcaggttgttagctcagtcagtgcctggcccctcataggctgtcatgagtatcttgcagatcgagagaaagaacaaaaatacaaaccatgtgtgagcaaaacaccatttcattccactggcccttgttacaaatgcagctaagatctgcttctatgcatcttagacgtctcatcccttgttcctagcaaatatctttggtaaatttacaagtttataaattgcttttaattttatcaaatcagaaatttgtcttgctcttaattatatgaaaaggatgctccgtttctcatataatgagagaaatgcgacgttaacctttctgagttatcggattggcaatgtaagccatagctgcaggctgcaagggagcccgttccttttgacgtgtgacatgtgacgtgtgacgagttttacgtctagtaatgtagcctacaggtacacatgcacacagctgaaatgacgtgtgcagtaggtttcccttaatggacagctcctgcgtgccagtctctattctaagtgctttaccatcatgaagtcatttaatctccaaagcaaccctgtgaggtagacattcggagacgttattattatccccacgttacaaatgaggaaactaaggaacagagatgaagtaatttgctagcaggggcaaagccaggttccagaccctgttgttccagggcccttgctctgctcacctcaagtagttgctccctatgtgaccaaggatagagcactatttgtgtagtcgtgtgctgcaaaatgacatttccatcagtagcagaccccatattcaatagtcattgcataagattctaatgtcgtattttgactgtaccctttttatgtttaggtgtgtttaggtacacaaacacttatcattgtgttacagttgcctacagtattccatacagcaccatcctgcacaggtttgtggcctgggagccgcaggctgtaccctatagcctaggtgtggagtaggggtaccatctaggtttgtgtaagcacactctatggtattcacaaaacaacaaaatcacctgcatttctcaggaggtatccccatagttaagctacacatgactataattgccaaagtttataaacaacctaaacgtccatgagtaggggattgtttaagtaaacaacactacatctctcctgtgcagccatggaaggatcataaggatacactgttaatggaaaactcaaggtgcagaaagtgctagcaggtgtgttaccaaaaaggatggggaaacatatgttcatatttgcttgaataagaataaaatgcttcagaaatgatacacaagaaacggggaaccaacattgcccatggggagggagacttcgtcatatgcacttttatacttttgcatttctgagccatccttgtatattacttattcagagacaaaaatcaaaaccccgagtactactgctttttaatggggttttttgaccatacaaccactttattcatagattttaaacattaaacttttaaaaagttttaatgtttatatatgaacaggtaacatatgttgtggttttaacaaaaagtcaaacaggctgggcgcgtggctcacaccagtaaatcctacactttgggaggccaacgtgggaggatcgcttgagctcaggagtttgagaccagcctgagaaacatagtgaaactctatctctaccaaaaatacaaaaagtagccgggcgtggtggtgcacacctgtagtcctagccacttgggatgctgaggtgggaggatggcttgagcctgggaagttggggctgcagtgagccatgatcgtaccactgtactccagcctaggcaacagagtgagaccctgtctaaatacacacatacacacatacacacacacacacataaagtcaaacagagagtgtaataataatgaagtctctcttccattccagtccagcctcctcccatgaggctgcctgtctgctgggtccctgggaattcttcctgctctctttttccacacagtgcacaccactgaccctgagtgtggagcagcccctcttgtttgtcccaccaaaactatatctgaaaataaaaatccagttttggtgaccaggccttttgtgggtgtttttggagacatcctctataattgaaataaacttcaactcaaatgatagcctctagagcccttggtccctgtcctaccatcatcacaaccccagccaatctcagtgcaccacttggtggttaaagtgctcggattcctttgtggtcggaatgtggctgtaactggaccctaaggagctgaggagagtcagaggttcctcaccaggcttgttttctgcacctgcagtggtgagaacaacttcctgtgtcactgctgcagcggtgagaacaacttcctgtgtcactgctgcagcggtgagaacaacttcctgtgtcactgctgcagcggtgagaacaacttcctgtgtcactgctgcagcggtgagaacaacttcctgtgtcactgctgcagcggtgagaacaacttcctgtgtcactgctgcagcggtgagaacaacttcctgtgtcactgctgcagcggtgagaacaacttcctgtgtcactgctgcagcggtgagaacaacttcctgtgtcactgctgcagcggtgagaacaacttcctgtgtcgctgtcaccacacacgtaggctgggttaggaactgtgtcagggagggggagctgctgtggggcttaatgaaccgagccctgtggaagaccgtgtgctagaaatgctatgctggggatgctgtttcatgtaggagggccttgcttacctcttccggccctgtccaggctaagggaggcttgggcagtacagaatctgacttgggacagtgtgcaggctccagccttttgcaacctagtacttagccagttgaggctgtggttaaaatgaaacagggctgccacatgccacattgtgtaaatgggtcagtgtcgaatgccatttcgaatcgcaccagtggggccagtcccgcctgtctttcacctgcccgcccacccacccaggatggtgtggattacagcctatgggcttatggtatgaggatgagcaggagctcctgttctggaatttagaaacgctaagagatttccagaattggaacaaaaagtaaagttgtactggcagaggggcctgcattgcagaaacagtgcataggcaggtatgtaaagacagacaggctgccatttagagccagcgggtggagtagcgagcatgggcagaggtaagtgttgagaaaacacagtcaacagcaaagaatcagagcagtattcttcctccccgaaaccattctgattgccaagaaaccccatggcaggaaaggaagaggaagcagggatttttcagccaacagagacattgagccagcaatggccctgtccccagcttgggtcgcaggagacagtcatgagggcccactgagggggttcacagctgaacatgtgtgtgcatgtgtttcctattgagccaatccaattagaaacaaacattgaaaggctggggcgtccgggagccccgtcagcatgagcagctgtccttgggcaggtcacactggcccctggccccctcaactatgtggggtgatgaccttctaaacagtaaccctgctctgaattctggggatgccgtggttaaaaaaaagaagaagaagaagcttaaaccagtggccagcagcagagtcggcctgcagataggcgttaattaattgcatagatgctctttgacttacaaattgcaagttgacttatttcgatgatattttcaacttatggtggattcatcccaacatagccccatcattaagtctaggagtgtactgaatgcatctggcttccacaccattgtaaagtcaaaaaattgtaagtcaaactgtcataaattggggactgtttataatgtgttttataacatcaggaattcacctggaaattgctaccaggattttcactttgcttgatacctgagaacagacagctgcatgggccatcgctccctgtggagctgtcggtggggcgggaccccagctgcccccatgttggctgggagctctcccatcagcactgtctttcctgtgtctgtctgtctctgatgtcccccatggagcctggtgtctgtctactcatccccctgctttcaaagatgttcttcctccacccagcttctgcagacatttgggtttttaccagcactgctatcccccagaacatccctcactgtcctgggctagctgtggaggagagagcccaagactgagtcttcccatgatctaggatcaaggatccaaacagcaggactcctccatgcaacccagttatcacacttggatgctgtagggcaagactcacagccaggcctggcaccagatttacccaccggatatcccaagacgggaaggtggctgctgctaggcatcggggaggcagcatcgagggaggctgcagtgagatcagcagggcagaggacagcctccaggacagtggagagtccagcccggctgacctccatcccagcagggacaggaagcggagggcagctcgatagaacaggaataaaagggcactggcttgcaggaatgagacactgggggaaagcagcatgtggcctgggcaataggtgcacagctggccagcaggtaaccaggaagtgaaggtagcaggccagagcccagctatcaggggaggagccaggcagcatctggcttatttctgtgagtgacagaggtcttggcacaggcaggtaactctgtgggtttggtgccttccagggaagttgaaagaatggagcctcatactgtatggcacagcagagcacccgtaccacaccttcagtgcccatcagtcccgctcgcggatgctggagctctcagccccagagctggagccacccaaggctgccctgtcaccctcccaggtggaagttcctgaagatgaggaagattacacaggtaatgagcctgaagtaagaggagacggccagcttccacgagctttgattgtccagagtagctcttaaaatgtagggctgctcctggcaaaggtggggctgatggttgtgtgtctctcttgcctgggagtcataataatcatggcaatttgcactcacacagctcaatccaccccaggctctgctaatattttacagaccagtaagtatgcttcaaaccagtaagtattttccaaccttcccagctgggagagcagggtctatatgcccaaccagaatggggtcttgccccctggtaagttagccacttctaggagcaccccctttccaaaggcccccatctcacagctcagcctcctgactccctcaagtacatccactttcagtccttgaggtcaggatgtgggaaggacacagttactcccaaggatccaggaaggttgggttcaaggagcacagctgggaaaggacttcgtggcagagatcctgaccagcctggaggcctagggttaaagacccagagaggatctcaagagatgatgtcagcagatactgatgcttcacagatgccttgaaaatcttacagcatctaaaaaggccctgcatgaatcgtttttctccaatcatcccattgccaaggtgggccctggtttggggccgccagttcactccacaaggcggccaaaaccacagctgcccagagaagctccagccactgagctggacatggcttttattcgtttgttagactagaagctgttcttctccctctgagccctcctgtagcaatttgtgtgagaagaggtatttctggttggacatattttccttagctaaatactacggctaaatgataaatgatgggtgatatctaagaacactgatgctttaagttatctaatatcttctgtgaaaaacaaataacaaatggaaaattccaccaacacatatcaagtataaattacggtcaattccattttaaatttcttctactattcctttaaaatagagcattgaattatgtatggactaatctgctctgtttccccctgtgatttataaactgtggcaagattcagtaattattaataaggaactgatttttttcttaaaatctgctactgacttcagccttgcacaatggaacctcactgtgataccattctgcagtccagcagtctactgagcagggattaggtggagagagggggtctccatgggaaggagatgcattcctggctctcagagaagccccctcaagtctcaggggtgagtgggatgggcagaccagagacagcaggagagcctattcagagaccaggacagagtgacagaggaggtgagaaccagacggtgccagagtatggaagccaaaggaggaggacgagccacgttagagtccaatgcaaggtcaggtggatatgagacggggtgtgcggagccggccatggtcatggtgcatcaggagtgacgggcccaggccagtggaggctgcacctggactctttgggcaagagagcagttgccaagaaatagaggaagtgagcgagggggacgagggaagcctagggagtacttgcaaatggccagggtcccaggacagcagcaggcaagatggtccctggagaggaaggttgaggaccagagcatctggctgggagaaagggcagcagctgcagtgggcagcgtggggcacaaggaagatgtcagtgctgtggttctgaaggtggacaactttgtggtgacagccaacctgctaggccagagccgtctggtggccaaagtgcaggtggaggccaccccagggactccgcagggtgctgagttgagagcagaccctgggctgtccccccgcccagagactgggattcagcaggtgtgggacgcctgggggtctgcacctgtagcaaccactcttaggtgcctgcaggcaccgtgggcttagggagctggcagataatgaaaccagcgaggatgggggcaggaggcagggaagagcttgggttcctgcaagagagtggctgggaggccaggacattactggcatggaaacacagggaagcctgggcctcaggaaagaagccatggttgagcaaaggaagctgagtgggctgagatcagctcaggacactgtggtcatccacacaggactgcaagggaagccaagaacccacgtggcatcgtctggaagacggagttccagggcagctccaccggtacaggagacagttcacaggatgagggtgatgtctggagcaggaccatgtgtgctcacaggctcagcacatccgtgcttactcgacaggctcaagcagaggcccagaagcctcaggtcgcttgctcagggcacagcagtcaggaaggaaaccagacttgttctcagtgtactcttattctcgtgggcacctcttgtctgcaattaatcggcccaagtcttgcatgcctctcgggtccgatactgctccagtgaggttctggtgtgctgttcttggatggcgtgaacggtggagaagatggtgataccaaactctcctgtccatcggcagttggtctgagcgcgcaacggcaaagcacatggagaactcccaagttgcttctaacatttatttgtttgtgtatttttttaaatcctggatttcctccacaaaggattgaaggtggagttttcaaataaacccgtgtcagtttaagcccatctagagaggcatcagccgctagccaggctgttcagcacgtgaacggagccccccttgtatgaagagacccctgctaggagttacgggaagtgacacaagaaggcagtggggcttggaggaactgtcacgctaattgaggcaaagggaaaagcagacctaagtacaaattgcaacacaaacatcatggttgcccagagaatgagctgcagctggaccagaacacgctcaggcggtggagtgattgggaccacgtggacagcaaggtggatttaatttaagaacgcttcatgggcgagaggaacctggatatttggcttttaaacacaattcaagtggacagccatactggggaggtttgtttacagatattcatctaggcatctccacccttggatgggcatcgtcttaacctgaccggtgggtgacctcagtgcagtgtgggggccctgcagctctgttgaatagcccccaaccttgcactgggctccttgcaaaattatgaataagctttccactgcagagagacccaggaacaggggtggggggtgtgaagtccatacacccggaccagcagctgggagcactgcttcaggaccctccccaaggctgtcctcctccgaggacatcctagaacattctgtctggagatggtgaggacatctgcactttccctgttcctagccaccctcctctcatccgctcagcaaatagtgattgagcacctgctctgtgcctaatgccaggaatctagcagtgaacacaccgaaccaagccctgcccgcccgtctcccattccgtgtctagaaagagtgaaaagattggtctgccgcctccctgtcgcactcctgccctcatcttcttaagatgaaggaaattgttcactttatcaagcaagacagacctgctgcctcctcagggagaagacgctgcaggaaaaggcaggagagaagtcctcaagtcaccacgacagccccgcgttcgctgggccagctgcgagggtgggaaggcgagagcccagtggctgagctggagttttgggctcaatgggtaatttaaagcaatggtgcgagaaatgaggattttggaggctgtcctcatagatgacccaggatgaggtgggcaaagaatccaatcagatgggaattgatccaaaatattatagtaaaccctctggagctggggggaggagtttagtaatgagttttagaaatggtgagtggcatctggaacccaggataccagcaccgcccaggaacagcatctagagtgtcctcgtggatacacacagctctgaaaggggttcacagtgggaaccgggacacgcaaagcccccccagtgaaaactagggaaataacaccagagagccttcggggagggaagccagcctcactgggtctaacactggcaaggtctggagacttcaagacgagtgaagagggctttgcgtgccccagcaaaaccccactgtgggcagcagagaatgaggacttttgtcttttcctcaagtccccaccaaatgaaggtggccagcaactcactagtctttactcttgagctcactccccatcccctctcataactcacacctcggaggaggaggtttttcttccagtaactcaaaagccttcacatgccccacttagtccctgtgtgtcagagctgtcggggtcccctgggccgtttcccagcgtaggagggacaggtgggcagtaggcaggagtccaccccagctgtagcttcaggcgtcactcctgccgaccagcgtggggaggacccctgcagcgtgccccgcccccgcctgacgggtagacctttaacactggcttcatctctgggatacctgggaaggacctagagggtgaggtttgctggcgtctactcagctcgcctgcagttctcagttgtttttccaacaacacaccagcctccggagtgagaagctggggacccctgggaacttgagggaagacacagctgccgtcccaccaagggctccaaggaaagcctaaaggggatgttctgaaaggggctcagccctcagcacagaaaacagcagccccccaaccctaggacagcactgtctagctgtgtccctgccccaccctagacctggccagcaacagccccaccaggcggtcctgagcatgcggagatccatccccattcccaccacagcgagttgcgggggggctacctaattcctcctggctcatcagcttgccagcagctcccctgacactcagcaccccctcttgtgttgctctgtcctccacgtggaagtcaaaggtgctggctggtcccagcatgatgactggtgcaagtgagtgaatgaaacagctgttccagcctctccctccccgctacccctccaggctctcacaagtcccatctcctccctgctccgggtggcgtacccaccctggatgtttcactccttctcatgccatccctgtctagagtgctcagactgacactggagcccagcgaggctcagctgtgcctgttacccgcagggacggctgctcccgccttgtcgtctggccgtccagccccagcggggcctgggagcgtctcccaaccctgccaagctgcgatatcctgacacagggatccgcgggactgcagtagatggagaaggcgtctctctggatgaaaggcaatgcttgtttctttaaggtgtgtgccatccggagtgtggtgacaaaggctgtgatggccccaatgcagaccagtgcttgaactgcgtccacttcagcctggggagtgtcaagaccagcaggtaatgcatgtcccgcagccctgtggctcaccactcagtgactttccagttgtatccttagcccctccatgtcctgatgccccagttaggaagtaacgtagcacccccaaacaatcatcacactgaagttaactgctttggagtttttaaatttttagtaacttggcattcctatcatgcaagtcatacatgtccattacggagaaattagaagctgttgcacgttggcgtccgtgcttataaagccttttctatctgtgttgttaaagagaagtgggtcatgttgggcgtgccaaggctgccccagagggcctggagacggatgcgattcaaggccctggtgctgtcctcacaggccagctcaggggacatggctcttggacaggctgaagcctgttgatggtctttctttcagtgtctctggactctggctgggtgtggggctttcacagaagctctcctggcacctccccagagagcccatgaggctgagtttaccccaagggaggatatcaggagctctgacctgggaccccacgtatatggccagttgcccggttcaggctgacccttctgtgatgagtgtgccctcctgtgtggcctctgcagtcaggccctgggctctgtccacggagctgctccagctcctggcatcaccactttctcagattctcttccctgccagtcctgcagctgccctgttgtccattctcatttcacaaacttccctgagcacccattatgccccgcatgtgccaggcctcagaggccacgatgacaggacactgctaggctccccaaaggcctgggtgacagatgcacccaccaaccactggtgcacacccatgagggctcaggcacgggtgcggccgtgcaaggtcaagccgggtgcccatgtggctctcgtggcgtcctcgagctcccagccacagcgcactcactggccaaagtgcaaaggctgtcaccctgctggcctcactcactgcccacaagactcactccctgagggcgcccgagagagggttttgccagagccgacagttccaaaagtcaaatacgaacctcacgatgcccttgggaaaccatgcgcaccctcaggaccttccagcagggccagctttgaaaagaaaggattcccaggttctatgcaaggcctccagcctctccacctgtgtacgtaggaacctcagaactgcactcaccaagacaaagggcatcatgtttgacattcactcctgaagccttcgtttcctcagaggaaacaaaggggcaggcctggggctggggctgggttggcaaggccctcaccctcctgcctttgctcctacaggaagtgcgtgagtgtgtgccccttgggctactttggggacacagcagcaagacgctgtcgccggtgccacaaggggtgtgagacctgctccagcagagctgcgacgcagtgcctgtcttgccgccgcgggttctatcaccaccaggagatgaacacctgtgtgaccctctgtcctgcaggattttatgctgatgaaagtaagtggcttgtttgtgggtacaagaactgatgagccagccccaactttctgggcccgtgtcctctctccagggagaatttcccagccttctgcttccgtgtattttgttgttctgagtaaggactttgaacagggaaggaggcagagatgatgaaatcaaagcacccagacctgttagttaatagcacttccccacagacctggccaggagaagttccaagtgatgctgagagacatcctggctgtccagggaatttcacccacctgcaacagagtcaacgtccactactgagcaagggcagagaggtggctagggccagccactcttgaactcagtctgatttcaggtatcagaagaggaggtcctgctgtctgtgctgtaatttctcctccaggaaagactatgccatcggcttctctgtaacacaggatgtgtgcgctgggcgtgggtcagggtacatgggattggtggtcagagctgggggagagccctcctcggcagagctgcggagatgaaattgggagtcagatgtgggcggaaggtttgcagacctccagacatgaaaaggagctgctgaccaacgtcagttgggctcggaagggatgggtttgtctttgccgggcatttcacaggtggcaaccgcacccctgaacactagacaggcagtgttttcctcgtcctacagatggggaatcaaagctgagcaggggcaaaggccacaactagtcatgatggaggtgggactcggactcagagccgcaaggccaggtgtcttgctgtcccaggagggtgggggctggacaggagttgtaggcccaagaccccatgccatgttttcgtaattcgcctcgccctgggagacacaaaagcagggcttgggttaaattgacaggggatagttctcaaacacattaaagaagctaccgtttggcactcgtggtcttccaggtagcaggcctccccacggccctcctctctgggcccttactgctcaggatgggtcattgatccggcctgtcatggcactgccgttacccctgtggacaagacccagcaaatcttaaaagacgtataaagccatcaaataacaagacaccccctttttttttttttttcgagatggagtctcactgtctcccaggctggagtgcagtggcatgatctcagctcactgcaccctctgccccttgggttcaaggaattctcctaccacagcctcccgagtagctgggcttacaggcatgcgccatcacgcccggctaatttttttgtatttttagtagagatggggtttcaccatgttggtcaggctggtctgaaactcctgacctcaaatgatccatctgccttggcctcccaaagtgctgggattacaggtgtgagccacctcacccgtcccagactccctttagcggggaaacaaaaagtcatgcaagacacatttcacagcctttgcaaacgcttgccctgggctgccagccagacctttgcaaaggacggaggcgccttcatccccacccccttcccaagggcacagttggccgcccttcttcaccccgacatcctcactcagcacctgctttatggcgtatgatgccacctgtgggggccctgagggggacacgtgcaggtgtggcaagcagctgttagctcccaggcccagagcaccccagccacttaggagtggtgcatggtggtgtttcatgaggcgccaacccagataataagttatgacattgcaggtgggagttggggtgacccaaaacttccccaagaggcacgatgactcgccgtaggttcctgtctcaccatctagagcagccagatcttcatacataggtttccctgagaaagcaccgtggtgggcaagcggcagcctcaggctctccaccccccacctgcccacacccggccactttcatgaagatttccacctcgttaaactctactcagcccaccaggaattggcctccatccctgttgaaataagcagaaccacctcagaggcctggtggttgtctgaggaccgtttttacctcagaaaggggaggtgagaattctgtgaccccacaccaggtacaagcggcctctggctgctttatttccacccattccggaggtggactcggggaacagcccacccgcacccccgctttgaaatgccgggggcctgcttgcccagatttcattcctgtcagtgtcgtcccttctcttttcttatctcgctatttttctccaggtcagaaaaattgccttaaatgccacccaagctgtaaaaagtgcgtggatgaacctgagaaatgtactgtctgtaaagaaggattcaggtaaaaccccctcgaaacctgaggaatgtcagggcggtggcgctgcttggagtgtgttatggatttaccacgttggtgcatttctcctaaaagctgaactgtcagaggcccaaagccattgagggtaaagattccgagtcctggaaatcgtgtgtccacttaggatggaaagggagaggatgggcggaatctctacattttacacaacatgggcgaattgggcaaagcagcacttgatcacatcacgtacagcacagggctgtgcccagatccgcctcctttcgctccagcacctccacctgctccagttcccctcgctgtctgggccggggatgggctgtagcggctcacccaccctctctcctctgcatccctcggtcttctctttttctcccagctcctgacatcttcacggcttcctgagggtgctctttacgttcctggttctccctgttcatcaggctcagccccataaagctcagcatgcattttctttaaaatcattctactgggttaatgattgttcttggaatattttgaaatgtttcttcagcccatttaatgcaaccaaactgcatttaatgcaatcaaatatacattacctgttcctccgaattgctgtctaaaatcttagaacattctgttcaaaattttttgggggacactcccatagtagggagactagcaccatggtccgcactggaaggatcacctcatgtccagatgcaggttctgatgcagcaggtctgggcagagcccacgactctgcatttccgcaggctggcagtggtgaggatgctgcggtccaggcagggagctgcttttgcagggtgaggcggtggagggctgcaacacacccccagccccgtctcccttctcaaatgctgtgaggactggaattctccatagaagaagtttcttttttggagtaaagaacaaaggaagaaaacttactgagcatatcttctcttattccaggggcttgcaccagtgttgcctcatttaatctttgcagcaacctgtgaagtagacataattcttactcgcattttacaaacaggggagatgaagtttccccaggaggcactatgctactgccttcatttccttcagcctgcctctttcttccagatcagagtactggggagaagaggaccccaagcagctaggagtccaggagagggaaggcaaagcaaggctcccaaagtcatgcatcacatctgctgtcatttaaacctgttggctggacaaggcaggattaggagtgaaaggatgaactggcccaggaaagggatcccccaaagataaaagagttggaagaggaaggaggcattccgctggcggcctgggagaggccagctttgatgtcccaggctctgcaggtcaggcagcccaggagtggatcctcaacccaggctggtagctgggggcatcaggaagaggaggctctgtgttcccagctccctggaacctgcctgtttcccagcagagaagtgctgaggggtccccgggaatgcatttatgcatcccgtcccatcctgtaggagagggaaatcggatactcaatgtaggaatggtgtgctaaagagaaaacgcctcctgtcggtagccccgccacatagaggcagtgcttccgtcactgacgagctttcagagaggcgtgcaaactccagacgcatcgccagccgtcagccacagagagcttccgtttattgcccaatatcctcttaagctgtgacttctaatcactgcagtcatgttaaagcagcaagagagcagccgagccgccgcctctggccctccatctcttcagggggatcaacacaggaaaggtttgcaggggagtgtcagttataaagacatgatttaactgccattcgcagtgggcatggcaccatgaagaggaagggcgccgggtgggtgtccgccatctatgcagaggagcttgccaacatacagacgtcttcctgctaaatgcaggtgtaagagataggaaaaaccagtgttttctcctactctcacacacaaaatacaacacacttcacctctggtagccaaaacgtgtgggtttttccccacacaccaagcagttctccagtgaaccgtaagatatacgtaataaatatatagctcaggctgaacgcagtggctcacgcctgtaatcccagcactttgggaggccgaggcaggcagatcacttgaggctaggagttcgaaaccagcctggccaacatggcgaaaccctgtctctactaaaaataaaaaaaatagccagacatggtggtgcacgcctgtaatctcagctactcgggaggctgaggcaggagaatcgcttgaacctgggaggcggaggttgcagtgagctgagatcgtgccactgcactcccacctgggtgacagaatgagatcctgtctcaaaaataaataaataataaataaataaatagctcaattctgacgctactagatgtgtcagatcctacaaattgagggctcagcccaagactgccccactttgatgtcaatcacgagtcccacatggtagcctgtgcttctgagtgaccagccataaatcggacttgccatgacccctccttgggttcgattaattggctaaagcagctcacagggaaagactttacttacatgtgcccatttattacaaaggatatggcacacagccagatgaagagatgcggagggtgaggtttggaagggttgagcgctggaccttccatccctatggggctgggctgggctaccctcccaggatgtggttgtgttcttgttcaccaccccagagctctccaaaccctgaccttttgggtttttatggaggttttgttacatagccatgattgattacatcattggccattggtgatcaattcagccttcagcccctctcacctcccaggagggaagtcagagtagtagggctaaaaattccaaagctctgatcaatggttggttccctggcagccagcccctgtctagaggctgcccaggaacccccagctatcagttattaaagacatttagcactttgataattccaagggttttaggagctgtgtgccaggacaaagaccgaacatatatttccttttttttttctttttctcttcacatatttcttattataaatcccagtgtcatagcaggagtctccgggtctgacagatgcaccccagagcccttgctcagtatggcaaacccatctagaacatgtacgtcacagactgtacacagtataatctcaggaactaaagagataatagtaggtgatattgattcacactgctgtgtgccagacactgaaatgtttatgggtattagctcattgagtcctccaagcaactttatgatgtagaaaccaattaacaggaagggaaacagatgtagaggggctggctggcttgcttggggtcgaacactgggaaggtggcagaagccatccacgtgggtggtctagctcagcatctgtgtctctgtccagcactcggctggctggagtgaagtgagggcacaaatggggcgaaagaggaaggtaggggctgcatctgacaggcctgctggggctccagagggcgtcttatttcaagttcattgcgaagctgcagaaggttccaaggtttcaagcaagagaggcaagagcgggttggggttcagggccagccttgtagccgacagccccgtcacacgccataaatgccaacacttcaagagggacttgacactgagactgagctagcgtgccaccagtgatgacccacacagctccacttctcttcatggggtttggattcgagttggagaaatgacagtaagaaaaagctatcactgggtcaaggacggagcctggcgcctgctgcctggtgatgggagctttgcttcccagggccttgtaccccttcctgctgggcccccagcggactgcgggatggctttcccgactttccttagctgagaactttcggtgacacaaagaactgtgcctcagccacttacatctcctcttgggaaaggtgctagagggcaagtcataattagacttttggaatggatgtggaaatctgcctctttcttttcaacagccttgcacggggcagctgcattcctgactgtgagccaggcacctactttgactcagagctgatcagatgtggggaatgccatcacacctgcggaacctgcgtgggtgagttcaccgcctgcggaggcctcgggccagcgtcacccaagcgtaggctagctgccttgaacccgagaaagccctaggacttcgtgggcttctgcatttattgcagcattaaaatgcaagggcaaaacaaggtacaaaggccctaccagggactgggggccgggagagtggggatttaatgtttaatggttacagagtctcaacttgagaaatgacaattgttctaaggatagatgctggcaatggttacataacagtgtgaatgtacttaatgctgctgaactgtgtacttaaaaatggctgagatggtagattttatgtacattgcagtggctcatgcctataaccccagcacttagagaggcagagatgggaggacagctcgagcccaggaactcaggaccagcctgggcagcaaagctgtgagaccccgttctccacaaaaggaaaacgttttgttggaaattttttttaaaaccatgtttttaaatttgaaacaaaatcccaaaacaatgcaaaggcccactttgaacacgcagcctgaggttctcattagaaacccagccaggcagtggcttatttcagatggggaaagggataagagatgctcaccactcataagccatcttgtctcagagctcagctcttgctgtggaacggcgcggacagaaacacaacaccataaacattgagagggctttgggagaggcgggaatggatccaggtggggatggggatgttttcaaacatagccttagttctttgtgcctatcttcacttattttgaacattttttcaaagaggaaaagaattctataaacaattttacatgtattataattgcccacaaagatgatggcacagatgtctcccaggcacagtttttatgcagaatagcagagaattcattcattttattggattttgttttgcagagctatttgcacagtaagttgaagtgcaccatcagtctgtgggctcggatatgttttgggttaagttttctcctctctccttcctgtccttggtactttggtcctttctaagaaactcacatcatatgagctttttctgcagtaatactttaagaattaagtctctactggccgggcacagtggttcatgcctgtaatcccggcactttgggaggccaaggcgggtggatcacctgaggtcaggagttcaagaccagcctggccaacatggtgaaaccccatctctactaaaaatacaaaaattagccaggtttggtggcaggcgcctgtaatcccagctactggggaggttgagacatgaaaattgcttgaaaccgggaggtggaggttgcaaggagctgagatcacacccctacatacttcagcctgggcgacagagtaagactctgtcaaaaaaaaaaaaaaaaaaacagaattaagtctctgctaaaccagtttccatgatactactgtgcctcagaaatcctgcagaatgggcacacccctccccacgtggccggccatgagcaccccatgcagctccctgccgtatgtcctggaatagacaggcctgatgaacaaggctgtggccaaggccagtgtcctcctatgattgccaggctgacctcagaccacccaggggagacatgtcctcctcagttccctcctggggcagccctcaaggccacagtgctcagcatctggatgggttccacccgctggcagctcagcagatttccccagcagtttgcctgtcgcctttttgtctattatttttattatttctttgacttatttagcccagatggattaggcagcatcactgatgttgcttatttaaatttcgtagtcacttgaatccataacattcaggcatacagttttgcaactctttgatttcaataattcacttttctttctttgagtccccagattgcctgatggcaaaaagctttatagagtcccttggaattctcatctcaaaccagtgacttctccatcacttcagctattaaattcattggtgagcaggtccacagctctgggggtctcccctgcgccccatgccctctggcctggggttctttctaagctcctgggaacgtgtacatctatcccctggcagcctcttgggagagagacctcattttcctcctctgagtcactggaggcttcttgttccatgtcaggtgtggacctcattggaggcagctgttctcagctgcctacttcctgtgccctggagacccaggcccacctggcattcccctccctgttcccattcagtgaccactgctgtccaccacccacccaggggcctgggcacagtcgtggggagggtcggagtcaggcatgagtgcttggggtagggcatggcggaatctgtccccacccttggctcacagtgccccagtgcacttggcaggcaactcgatcgagatgagcctctcatcctcctgagtccaggtgccccgtgtgtcctggcatggaggttgtaatccttcggggctgctggcacagctgggttaatgcagtggccccgtgggacgcgacttacccacctggggcatggcatgtggattagcagctgacagcctgcagggcacacacataccaagttgcggggcagtgccccaagcacctgtgacggtcagccctcaagcatgagcgtcctgtgcctgagacggcactacttgaaacagcaaatgagaaacaccacaacagaccaagagagattcaaaagaaaggaaaacgctttctgttttagtccctgtcgtggcacattcttccagctttctgaacaaaggctccatgttttcactttatactgggccccgcaaacaacatagcaggtcctgtataagcacagcccgttctgctcttattgctatgattgtgggtgcttttaaagtgttcaaagtctatagagacttgcgacttaatggaatccttaaaagactttcactgagttatgaaattcatattttttagtagttgagaaaataggtcgcttagaaaatcaacccactttaacagcttttttattgcggtaaaatacacatcacataaaatgtaccatcttgactatttttaggcatacagttcggtggcattaagtgaatttacatttgtgtgccaccatcgccaccacctccaaataaatgtgttttaacaactttgaagcttaatacattgagcatgaaacttaagtacaaacaagaatgagctttctttcccacttgggaggctccacaggtgttaaggaccctggtgctggaggaaggatagtggggaagacgggttcagcaggtgaggcgtgagaggtacaacggcaggccctgaacagctcccaaaccccactcagagtggcaccccgcctggtgtatgagacccacccaccagatgctcccagagaccagtgatggggaggggcggcattggccaaagcatacgagcagcctctgctccagaacaacataaaccagacagagtcccgcccccggggcacagctcttccaccgcacctcaggaagagagggagacacctgccatgaagacggtggtcctcaagaggccccttgaggtccctacatctgcctcctgctcaaaaccctgtggccttctcggcttcactcttcctgactctccaaggaggagcttctcctgcaggagctcagaattccctcccaggcttacggctgtggttctgaggtgtgaagccagccccagagcccagggccttgtgcttgagccctccaggctccggaacctctgcaaagggattttcccttgatgcagcgagaggccccatctgagtccagagcagactgcaaggcctcgatctgcgaccacaatcgaactgaagcagctgtgaggaggtttacctgggcattgtgattatcatagagcccctgagataatctcctccctgcctgtaaccctctccgctgtcagtcagtgactacttcactgcccctctctgacgtcccatcagttgctccctggagacacctggcccagaggaggtgctatctagtcaactagtccaacatctgacccaggtcgacaggtcctcctcggaccctgagccaacctgaaggttttcctccatgactcgtggccctttgctcagaactgttgtgtcttcgagtctctcctccctgccctataaacccttagtcttaggcatttgtttctctgttgttgaaaacgccctggctgtacacaccaaacacctgtcaacaccattcccaaagatctcttctttcatcttcccccgtcatcttctacagcgttctgtgcaatggaagggccacaaacgcaagccacgggtgcaatttgaagttgcctagtaaccatatcttaaacagtcaaatgaaacaggcaaaaataattttagtaacatatcctattcaacctaatgtgtctaaaatattgccatttcaacatgtatccatacaaaaaataaatgagctgttttatattttttatatgaagactttggcactggatttccaagtgttcagggagcagaggtgggcctaggcctgttggaaacagggcccatcatcgtggcacggccagtgggcaggtgtgctccctctgagatcatctcatgcctcgatgtccccgtctgtgaaatggtgatggcgatgcccacctcctgggagtgggtgaggacggcccagctcacagaacctgggaaatggcagctgtggtggtggcctgggggctcctgaatggtacccctgatctcacaaggccctgaagcaggcctggggcatggtcttctgccagccatccctgatacctgcttcttttcctgtgtctctcagggccaggcagagaagagtgcattcactgtgcgaaaaacttccacttccacgactggaagtgtgtgccagcctgtggtgagggcttctacccagaagagatgccgggcttgccccacaaagtgtgtcgaaggtacggtcctcctggcggggaacggcaggcagctgtgtccagcaaaggagtgcctggagggcagagtctggcagcatcttccccaggggccggggagggcatgttgcatcaccccactgtggacaggagcccatttacagagctgctgaggggccttcgtccctttgttcactggatgcatatttgttgggtccctgctgtgggcagacaccgtgcagcagcgggataagatgggaagcagaatagcaaggtgctcacaccccattggtggactacgcgggacgtccctgcccatgtcgcgctcagcatgcatcctttgcactgtcgataatcagagaaaccatgttttgggttaaaaaaaaatttttttggagacacactctcactctgtcgcccaggctggagtgcactggtgtgacctcagctcactgcaacctctgcctctgggattcaagcaactctcatgcctcagcctcccgagtagctgggactacaggcgtgcaccacaatgcccagctaatttttgtttttgttttcgttttttttgagatggagtctcgcctgtcgcccaggctggagcgcagtgggcgatctcggctcattgcaagctccgcctcccagattcacaccattctcctgcctcaacctgccgagtagctgggactacaggcacccgccaccactccccactaattgtttgtatttttaatagagaccgggtttcaccacgttggccaggctggtctcgaactcctggcctcaagtgatccacccacctcagcctcccaaagtgctgggattacgggtgtgagccaccacacctggcctaaaatattttttttagttagatacttagagaaattaaaaagatcctgacaatttcctcattctaaagctgttctctgcacagtccacgcacatctattttcaccctccatatcctcctcttgtgcttcctcccatgtgtccctccacagagtcaccattcttatttgatggccctggacccttctgttgttggacatgagctgttaaaggaggagctgtttgctctggtctcctcttttctggctgaatattgccctatgttgggagatcatgaactcaggacccagaacagggcagggcaacctgtcttattcagggtgggagcaacattgaggagtttgaagggacctgtgagggtgtgacgatggggtgagctgtgaggggtgacgatggggtgggctgtgaggggtgacgatggggtgggctgtgaggggtgacgatggggtgggctgtgagggtgtgacgatggggtgggctgtgaggggtgacgatggggtgggctgtgaggggtgacgatggggtgggctgtgaggggtgacgatggggtgggctgtgaggggtgacgatggggtgggctgtgagggtgtgacgatggggtgggctgtgagggtgtgacgatggggtgggctgtgaggggtgacgatggggtgggctgtgaggggtgacgatggggtgggctgtgaggggtgacgatggggtgggctgtgaggggtgaccatggggtgggctgtgaggggtgacgatggggtgggctgtgaggggtgacgatggggtgggctgtgaggggtgacgatggggtgggctgtgaggggtgacgatggggtgggctgtgaggggtgacgatggggtgggctgtgaggggtgacgatggggtgggctgtgaggggtgacgatggggtgagctgtgagggaagtaccaggcgttagcctgctttcacagtgctaaaaagaaatacctgaggttgggtgatttataaagaaaagaggttgaattggctcacagttctgtaggcttcataggaaacatggcgccagcatctgcccagcgtcttcactcctgatggcaggtgaagcaagggcagcacatcacatggcaatagcaggagcaagagagggaaggaggccgggcacggtggctcacgcctgtaatcccagcactttgggaggccaaggtgggcggatcacctgaggccaggagttcaagaccagcctggccaacatggcaaaaccccttctctactaaaaaaaaaaaaaaaaaaaaatgcaaaaattagttggacgtggtagtgtgtgcctgtaatcccagtcttacaggaggctgaggcaggagaatcgcttgaaccaaggaggcggaggttgcagtgagctatgatcgcaccatgcactccagcatgagcgacagagcaagactccatctcaaaagaaaaaaaaaagtcaggagttgccacacacctttaaacaagcagctctcacatgaactcactcatcaccaaggggatggtgtgaggccatttatgagggatccaccccatgatccaaacacctcccaccaggccccacctccaacactggggatcacatctcatcatgacacttggaggggacaaatgttcaaaccatatcggggggcttccgtctgaaaaagactgaaaatgagggagccctcaaaggcttgtgtcagagcaggggaggggtgcccatggctggctgccagctgggtaccgattcaccacacagtggggtctgcctcccaggctgtgtgtaagaaccactgtgggttgtaacctattcccctagaaacaaagccctacagtgagcccatgagggaccaccaagcccttgcacttgtctgacccacagcagagggacctggtggcggttacgtatctcggcaagcatcagccccttctactgcgttgctgtaatggaggaaacttgccacccgcttgcaaggtgcagccttgctgagtcctgcacggggccctgggcacagttgtctgaagttaaacccttcatggtaaccagtcagctggttctcagataattaaatatagcaatccagggagaacttggaattaaacagtgataatcactttcatttgtcaaatgccctggatttcagggcatgctgatcatgcccacagctgtgcaactggacccctgcaggcagccccaccgcaaacctctctttgcccctcaggaggcagcaggcgggcagccccaccgcaaacctctctttgggcagtggaggacaggagtttcctgggtacttgttcccaggtgaggggcagctttcggccctgcagaggctgacagtgctggggctgacacaccgggtcttggagaagcaccccccaggaagagcgtcagtgtggacgcctcccaaaggaagcaaggccttggtccgattggttctgcggggtctctccccacttggacagcctgagctgagaaccacaggcatcctccaggccccagaatgctggtggacgccgtggccgtccgctgctgctgtgccaggcagctccgagggagcatgtggccagacgggctgcgttggaacatgcaggtcaggacgcaggcctgctgggttggcaactgcaggtggaagccgaggcccgacgctgagaacaatgcctgataagttccctaagagaggggccgaggcccgacgctgagaacaatgcacgataagttccctaagagaggggccggacaccctcaagacctagtgagaggacccagcaagagccagcctggacaacttggaagaaaaacaggcctctgtggagtgcttgccagcgggggaggcaaactcctcatgccctggccctgcctccacttgcccccaggctcagcgggggcagagactcccaggggcacagcttgaaggggcacgccttctgccaatgcgcatgctgcgtccaggctggagcatgaaagcgtcagtcttctgcatcccactcctgaacaggcaggaggctgatgggagtggcctctgcaagggagcagggacagagggctgcatccggcatccctgtccttccagaatgtggcagggcaaagcggccatggtgtttgggggaaaagtaggtaccatagatggttgcagaaccagaagcatcttaaaagccaccctgcccaaagctggtgctgcccacgaggacccgctgctgggcacggtaatcctgacggaaagcaggagctacacagggtctcccagggagagccgtctgcactggcctaacggggacgggagcatcacccatctccctgagcagcatggtgatggattatttccccagacctccagaggagagcccagcctggccaccaccttgccctgaacctcgtgagaccctaggtggagagcccagctgcacctgcctggacttctgcctgcatagcggggagccgctgagtgggtgttattttcagctgctgagtgtgtggcaacctggttagagcaatggaaaaccgaggcccctgccatcctgctgagctgggtgaggttgtatttgaagaagcaagcaagccgtaacctcctggctgtccaccgcagcgcgctcctcaccacagttcttcactgatgaagcagccctcagccgtggcctgggggcactgggcccctgggtcctccagaccactgacatctctttaaatgactcagctcggccctggttctcgtctcaccagtggcattgtctgtaagagaaaccagagggtctgtggggaaagtcataacctgtactggggcatcagggtttggtggctgggccaccagaatgtgcaagggcaggtgtggggagggggcagcatgatgggggcagacccatggggcttcccacaagtgcacaaccccctctggcaagtcctctaaccccatcctttcctctggggcggcctggatgggaatattagaaaggctcgtgggtgtgagtttgcctgtggggtttacacatttacaattacagaccaagggcttgagctctaggctcagcatcctcagacacactaggaataaaacccacctcccacccaggctgaagcgatgctgcacctggggctccagagcagcggagtccgtggtgagaccagaccccatcagagggctgctctgcaaagagccccacgaggaggcctggtgtctgagcgtgggaaggcttcacacagcagggaggggacatctgtataaagcaaagaactgccccccagggaggcccaggcatgagcacaacaaagctccaagccctgcctatggggcctgttccacccttaactggcaacaatggggaggtgggcagctgatgcaagcactgtggagaccgagtcaccgggctctggactcaggacaggcagcagcatagccggggtgcactcacggccccaggatgggaaacgtgctccttcaagcactcggcccgcatcggcaagtgctttctgtagagggcacaatggtcagtcgttcaggcttttggggccacactgcctctgtcacagctactcagctcagccactgctacacaaaagattgtcaatgaatgagtgtgactgtggtccaggataaatgctggatgtggcccttgggctgtagtgcaccaaccgtcccctgaggtcacgtttaccctgcattagaaatagccctggctggtgtccatctctgcgcaggctgggccaggaccgtccgagaggggcaggaattgtggggcatctctcccactccccgagggtaagcaggcatggccacatataggtgacagcagccttctggtcagctcgagtcaggtgtgtcacatccctgggtggagtctggcctggaccccaagcctacagccatcgcagcccggcagccgctggagagagaagactgacacagctctgggagccgtgtggtggggtgggggctgggtgccagggcccaggagggtgtccaggtgagctgcgggaagcctcggaggcctggcccctgatcctgggcttgctcctgccaactggccatggctgtctctgccctcccagggcaatagtgaggtcagacaggagaaaagacatgcagacactcagcccctgtgtcagggaatggtgggcgacacagcctctccacagaggaccgaggctgagggggtgggaaggaggtgcagggaggtgagggttctgggaagggagcccggagtggtggagcctcttccccagacttcagcaggaacggtatcttcccacaggtgtgacgagaactgcttgagctgtgcaggctccagcaggaactgtagcaggtgtaagacgggcttcacacagctggggacctcctgcatcaccaaccacacgtgcagcaacggtgagcagcagctgggttaccctggggctgcctgtggaggagctcagctggccagctcgtgctccaaagagaaaagcaaagccacataggcatggcggctccacagacaggcgttcgtgcccctgatccgattgactgtctgggattcctctagctgatatggaagacagctgccctgtctcccagcttccctctaggcctctcacatcgatcagagaggcatcccagccactgctgatctgtttattgagtgactcctaaaaatgattttgtccttgtactggtcccactgccatgccataggccgccggtggcccggatgtgacgacataccataaaagaagcctgacctggggggtcaaagccaggaagcctggagggtctctgctcaggacgagggggacagagcccagagtagagcacacgctcagcagcagcaatcccagctctgcagggatccagcatggacctgcatctgtgctgcaggagagccctggctctgccataggatgggggacaaggacaagttgtaaaaacagaaacttaaaagggcaccaaagctaagtgcccagtttgggaattccaggcaccaaggagggttggcaggactcgggcctggaggtgcagtgcaggagtcattgtagacacacgggcagggaagggggctctggcccagcaagcagcagggtggagccacattctgacagccaggagaggaaggctctctgctccagtgtccagggtcagggcaggtggtccttgggtatgaagctggcactggccctgtccaggcagagcatggagcttgtggagggccctgggatgcctccttgccttgttactggttattatttttggggggtggcgggagggttgtctaattatgtcccttcaaaggcccagaaactacttctttgggaagtcacctgcccaggttatgtatctagcccaaaaaagtgtggttgccactggagggcctcccaggtccacggatgatgcatcctcaaaggcctcttccccttgctgcagcggtgtcctcagcaagtcctgtccacggcggctcccttccccccatccccactcctccctgtccgccccctccaccctggaagcagcttccattccctcctgcctccaggcccgtcctccggcctcccctacagtcttcctcctaagctccactgccagcagttgtccagaaagacaggtgcacatgtgccccacaggcccaggctgggtgttctcctgagatccctcccacaccacccccacatcctgctcatgaatccccttgtcactgagactcagcaagagccccatataccagtgccctcccgccacacagggctcccagagtcaagtgcattgcaggagaggggcttcaagggctgccatcctgctgcccacctctgtctgtgtccctcttgcccagggcaccactgatgcccagcatatgtggaatgattgaaacaatatttatttatgtatttatttatttatttttgagacggagttttgttcttcttgcccaggctggagtgcagtggcatgatctcagctcactgcaacctctgcctcctgggttcaggtggttctcctgctttagcctcccgagtagcttggattacaggtgcccaccaccatgcccagctaatttttatattattagtagagacggggtttcaccatgttggttagactggtctcaagctcctgacctcaggtgatccacccacctcggcctcccaaagtgctgggattacaggcatgaggcaccgcgcccggccttgaaacaatcttcacaggcaccgaagactgacctttccctcttttgcctttcctgatgcggggccccagctgacgagacattctgcgagatggtgaagtccaaccggctgtgcgaacggaagctcttcattcagttctgctgccgcacgtgcctcctggccgggtaagggtgcctagctgcccacagagggcaggcactcccatccatccatccgtccaccttcctccagactgtcggccagagtctgtttcaggagcggcgccctgcacctgacagctttatctccccaggagcagcatctctgagcacccaagccaggtgggtggtggctcttaaggaggtgttcctaaaatggtgatatcctctcaaatgctgcttgttggctccagtcttccgacaaactaacaggaacaaaatgaattctgggaatccacagctctggctttggagcagcttctgggaccataagtttactgaatcttcaagaccaaagcagaaaagaaaggcgcttggcatcacacatcactcttctccccgtgcttttctgcggctgtgtagtaaatctccccggcccagctggcgaaccctgggccatcctcacatgtgacaaagggccagcagtctacctgctcgttgcctgccactgagcagtctggggacggtttggtcagactataaataagataggtttgagggcataaaatgtatgaccactggggccggagtatctatttctacatagtcagctacttctgaaactgcagcagtggcttagaaagtccaattccaaagccagaccagaagattctatcccccgcagcgctctcctttgagcaagccgagctctccttgttaccgtgttctgtctgtgtcttcaggagtctcatggcctgaacgaccacctcgacctgatgcagagccttctgaggagaggcaacaggaggcattctgtggccagccaaaaggtaccccgatggccaagcaattcctctgaacaaaatgtaaagccagccatgcattgttaatcatccatcacttcccattttatggaattgcttttaaaatacatttggcctctgcccttcagaagactcgtttttaaggtggaaactcctgtgtctgtgtatattacaagcctacatgacacagttggatttattctgccaaacctgtgtaggcattttataagctacatgttctaatttttaccgatgttaattattttgacaaatatttcatatattttcattgaaatgcacagatctgcttgatcaattcccttgaatagggaagtaacatttgccttaaattttttcgacctcgtctttctccatattgtcctgctcccctgtttgacgacagtgcatttgccttgtcacctgtgagctggagagaacccagatgttgtttattgaatctacaactctgaaagagaaatcaatgaagcaagtacaatgttaaccctaaattaataaaagagttaacatcccatggcacaggagcctgtatttctttccacggcacacaaaatgaaacatgagtgctgaccaagtgttaagtggacgttactttaactgtggtttcagatctgtttgatgtcattacgtggaaggtcttcttttgagctttagcaaatgttgatgtaaggaagcaatggaggaaatcccagatcccaaccccagaatgtcactgggcaaagagaccccttcagaccacgttagcctcactgggaggaggttctagagcctctccagatgtaggggccccttccatctgtcacgggggagctccccagagcccagactgcctcttcaccggttgctgccaagtgtgattgaattaggttacagcttgtcttctatgcagtggctgaaatccctgaacccatggctgatgcactccttgggatgtttaccatggcctctctgtgaagtcagaagcttgtacttgctaggaatcctttggctgcaagtaaaggaaacgcaccaactagaaatgacttaggtgaaaacaagagtgggtgaggggcgttgttttgagaatccagagtggattcagaatttcagggaggggtgcagcagagccttgggaaagctggagccggcattaaatgtcacctggaccctctctgtacggcagcactgcccttctctccatggccgccttctccagttgatgggacaaatgacaagacctccagcatcttccaggtaaaactggtacaaatccaacccctcaggccaactttctgggtctgtttcttggctcttcttttcccagggacaggacttggtcagcctgccttacatgggtactctccctgtgtcatcagctgtggctacaaggacaggcttgtgcagcagaatatggctgcagggagctctgcagcagaggaggggagcagtgtgcagctctcagaaggcagggcaagtcacacaacccaacagctggccaccacaagcaccaattgaccagagttgtgcgtgtgaggcagtgaaggaataagtgtgtttgggatgaacattcaaccccttgccccgcccatgagaccgaccttgaattaaaagtaacttgttaagtgctgctggtgccaggcagccttttagaccctagagcccagataccagcaaatccgagctgcccactgagagcttacagtctaccatgtttgcagctgaatcagaaataaactcctggccgggcatggtggctcacacctgtaatcccagcattttgggaggccgaggcaggcggatcacctgaggtcaggagttcgagaccagcctggccaacacagtgaaaccccatctctactaaaaatacaaaaattagccatgcgtggtggtgacacctgtaatcccagctactcgggaggctgaggcaggagaatcgcttgaacccaggaggtgaagctgcagtgagccaagattgcaccactgtactccagcctgggcaacaagaacgaagctgcgtctcaaaaaaaaaaaaaaaaaaaaaagggaagaaactccctttatctcccaaagggagatacaactacaggaaagccaaccaggcagcctcgtcgagtggctaagccaggcaagcccagcttggggctgacaagtcgggtggggagttgagaagttgttcacaaagtcctaatgactaaactccaccttgttgaaagagaccaactacatataatgtctgctcacaagtggtccgaccttgaggttaaaattgtctggactctggcaggatatgtgtatggattttaagtgacaggatcatggatcacctcctctaaacctgtcatttcccagacaaggacactgagacccacagaagtgaatgccttgcctggggctgcacattggcaaagttgctccccaccgggcccagggaaggaagctggctggctgcaggaggggcgtcgttctgcagctgcccaaatgcagccatgatgcatttgttttaaactagctttattttcagggggtgatgtttacctgaccttatccccaaattctttggcacctcacagtggaccccatgtgtacatccccatccctcccaggccactactgactttgtatcttgcgactcttcaaaggactggtgagaatggcactttgtacagaagacacacctgaaatgggagggggggtggacagaacttaaaaaaataaaagggccagccacagtggctcacacctgtaatcctaacattctgagaggttagaagcaagaggatggcttgagcccaggcatttgcagccagcctgagaaatagagcgagaccctgtctcaatcaatcaatcaaaaacgacagagatagatagatagatgatagattgatagatgatagatagatagatagatagatagatagatagatagatagcaacatggtctaaatgagtctaggagtggagtgtccttgaacttggggagaccaccctccactgcatttgcattattgatactatggctggagagggccttttgcctaaaagcttggagtatgttggggcccccgagagcaggtgagggccagaggttcagatcagaggatggaaaaaggaggtggagaacaggaaagaaaaacattttaataagaacaagcaggggtgatggaaagtatacaccaaggccattctctagcatcttaaggttctgcccagccagctgggaggccactgggcactggctgctggggggaaaggaagaatctgctcccctaccccagccttcactgttgctttcctcgcacgaaccccagactctatccttcctggttggctgtttaagtcctttcctgacaccccaggctttgtggcttatctgagcacagaacagcatccttagatggtacagcactgagcacccaccttagatcctaggattcagtcccaccatccaaagcccctcaccactacagaccagccacactaagggtgaccagatatcttagactcccttttgaaacaacaggaaccaaagtgcccagggcagagaacatcctgttgccaaaatagtggttctcaaccagggatgacttttgtcttccaggggacatttggcaacgtctggagacattttgggttgtcacaactggaaggatgtactcacatccagtgggtggaggccaggaatgctgctaagcaccctgcaatgcacagcagcccccatgacaaagaactgtccagaccaaaatgtcaatagtgccgaggttgagaaattccggccaaaagaaatggaatcaaaaaagaaaattgtttgcaacttcatagagataccctcaatgaataaaaccacatatggtttgacttctgtccctgttcctatgctgaagggaaacttgtacaactttccctttttaaagtaaagagataccaccccactcttttttttttttaaacacagcaacagaagggccccaagttaaaaccagctctccagcctaaggactccacctggtggtcctctctggaattaaatgaagttgaggttttattttgtttaattttttcattattcagttattttgtttaacatttttagttattttgtttaaatttttagttattttaacttttaagttattttatttcttagttattttaacttgttattttaatttttttagttattttaactttttaaagttattttaattctttagttattttgtttaacttttttagtttttttagttaaacaaaagttgcagtgaccggggcaggtgtgatggctcaggcctgtaatcccagcactttgggaggccgaggcagggacagggggcaggggaaatcacttcttaggtcaggagctcaagaccagcctggcaaacatgacaaaaccccgtctctactaaaaatataaaaatcagccaggcatggtggcgagcgcctgtaatcccagctacttgagaggctgaggcacgagaatcacttgaacctcatgttattcctcatgaggcggaggttgcagtgagccgagattccgccactgtactccagcctgggcaacagagcgagactccatctcagaaaacaaagaagttccaagtacaatacaaagaaattccctcccaatttgagagtaagttgccgatataccctatgaccgccccccccccgccaatacttcagtgggtatttcctatgaacaacgacattctccggcacagccatcagactcaggaaattaacatcggtatgttattaccatcaaccctctgactgaattctagttctgccagttgtcccaataaagttcttagcaaaatggtctggtttagaaacacacttttcacttagtcatcatgtctctttaatgttcttccatctggaacagttcctcagtctccttgcctcatgatgtggaagcttttaaagactataggccagttatttgtaggctgcccttcgctgtgcacttgtctgagggttcctcacgttttgagtcaagtcatgcatctttgacacgaatctcacaggctgattctgtgttctgtctgcattctagcagggagtacacgatctgttccattattggtgatgttaacgatcattggttagagttttcttccgggctatgaagtgatgcctgccaaagcatatccactaccaccgctgttcaacattgtgctaaagatcccagccagtgtaacagggcaaaaaatacagaaccagtataataattggaaaggaggaaataaaactatcttttttttttttttttttttttttttttgagaccgagtctcactctgttgcccaggctggagtgcaatggcatgatcttcactcactgcaacctccgcctccctgattcaagtgattctcgtgcctcagcctcccaagtagctgggattacaggtacgtgccaccacacccggctaatttttgtatttttagtagaggcggggtttcaccatgttggccaggctggtctcaaactcctgacctcaggtgacccacccacctcagcctcccatagtgctgggattacaggcgtgagccaccacgcccagccaactatcattattctcaaatagcatggttatgtatgtagaaaatccacaagaatggttacagataaacttaagtaaatttcacaagatcgctggatgtaacgccaatatacaaaaatctgctgtatttaaatatatcaaactaatgattagaaaatggagtttttaaacaaaaggtactatttacagtagcatcaaaatctatcaaatatctagacaatctagtaaaggatatacaaggccttgacacaaaatctgcaggatgctgctgaaattaaagagtgcctcaataaatgtagggctataatatgcccattgattggaatacttcatattgtaaagatattaattctctccaaattcttctacagatccaacacactacaaatcaaatcatgggtgctttttcacatatatctataatttatgttcacatgcaaaggattagaataatcagataactactagataatctgagaaaaaaatgggagctttttttgagggacaaataccaagtctttttctaaagcttgtattctgcaaggatagctgactaaacccatggaaaagaacagctagttcagaagcagaggccctcacatatttggacacttgatttttgaaaagagctgctctgcagagcagtgggggagaagatggtcttttcaataaatggtgctgggtccaccaaatatccatatggggaaaaatatatcttcttccctaccttagactatgcacaaaaatctaggccagagagactgcagatctaaatggacaaggtggaagaagaaagcttttagaagaaaatataattttggagtaggcaaaagtttctcacagcgtactcgaaaactattagctgtatagggaacggttcataaatcagactgtattaaaatgaagaacctctattcatcaaaagataccattaagagagtgaaaacccaagccacagggggaagatactcactacagacatagctcacaaggttcctattgaaaaaatataaagagctcctacaaatcagtttaaaaataaagcccaatagaaaaatgggcaaaacacctaagcagacacttcattaaagaggttatccaaacaaacataaatatattttttaaagttctcaattgtgttagtaattagggaaatacagttaaaaccacaatttcataccattacctatctaccagaatggctaagattaaaaagacaatactaaacgttagcaaggagtttaagttggcaaccactttggaaaactatgtcctacttaagctgaacataagtaagccctatgacccagtaattccatccctgggagtatatcagtatatgtgttcacataaagatatatattattgagtttgtaggtacactatttataatataaaagagtgaaaattacccaaatgttcatcaacagcagaatggataagtaaattgtaaaacatccacaatgaaataccatattacagtgagaatagattaactacatctacacacaaacataatgtttagcaaaaaatatgcaaggtacttcatttgcataaatacaaaactagataaagcaaatctatacaagatggcaggataatggttacccttggggcaagggtggtgactagatgaagacaggaggagggcttctggaatgtggcaatgtcctgttcttacgaggatgctagttggttgggtgtgttcagtttgcattcttctatatgtatatcatacttcaataaaagttcaaggagaatcatctccgggtggattgcagaactaaatgtgaaaagcaaaacaatcgtctagtagaccacataggaaaatatgatgggggtaagggaagatttcctaaggcacatgcacatgcacacacacccaatccactaacctaaagaaaataattgaactacataaaacttggaaacttctcagccaggcgaggcggctcacgcctgtaatcccagcactgtgggagtctgaggcaggtggatcacttgagctcaggagttggagaccagcctgggccacatatcaaaaccttgtctctacaaaaaatacaaaagttagccaggcctgttgacctgtgcctatagtcccggctatttgggaggctgaggtgggaggatctcttgagcctgagaggtcaaggctgcagtgagtcctgatggcaccactgcactccggcctaggtgacagagtgagaccctgtctaaaaaaaaaaaaaaaaaaaaaaaaaaaaaatctaatcatcaacaccattaagagtgaaaaggcaagccacagagtgtgttcatatccctaatatataaagaaattccacaaatcaataagaaaaaaggcagacaactccataaggaaaaaaaaaaaatgagccagggactcgaaagaacacttaaccaaggaagctatcagaatgggcaccatacacatgagaaggttctcagcttcattagttattagagaaaagcaaagcaaagcagtagtgcaataccaccacacacccatcagaatagctgaagttatagagttaaaatgccaagaaggctgaagctggaagccatgaaaacccttacacaccgctggagtgtgtatattatttcagcctcttagcataactgttgggcattacttattgatgatagatataccctatgtcccagcagtcccactccaggacaaactcatgcaaacgtgcatcagaaccacgtaccagaaaattcatagtagcattactcagaatagccctaactgaaaacaactttgatgtctatcaacagcagaataagtaatttatggtataatatatacaatggaattctcttcagcagcaaaagcaaacaaaccatctctgtatgcaacctggatggactccagacataatatagactccatgaaactaggccaaaaaaaaaagcatactgcatgattctatttatagcaaaagcaagcaaaccgaatttgtagtgttgagttcgcggttgccttttgggaaagagggaggctttcagaatagcggtgttttggatcccggtgtcggctacgcagctgtgttcactctggtcattaatcactgtaaattcctgatatgcacacttttatgtatatcacatttcatacatatgaatattcagaagtctaaaggtcacaagcttaaccgcaaaccctaccgtgcccgaggccgggctggacttgcggggcggtggggttgtcccggcgacctgccccaggcgggccacctagcccgggatctcacactgtagcccggagccaaggcccaggcccggggcgggcacctgaactgctggacccttcactgaaccccacgggttcccgcgacggctggtggagggaggacagtcaccgcttcccctcccacctcgaggtgcgctaatgcatgagaaagttcccctcgggtgtttccacattcgccttaacttttaaacaccaacgtctggaatcaggggtcctccagactccgaaacacaccctaggaaacaacccagaacgagacacatcccctgtgcgcgcgccacgacttccggcaagaacgcccccggaggcgtggctcttcgattgcttcggcctggcggtcgagctgcgcgcgcactcggcggctgcgattggtgctgcctggcggcggggcgcggggcacgctgggacgtctcgctggcgggaggccacgggctttccacagcgcgggggaacgggaggctgcaggatggtcaagctgacggcggagctgatcgagcaggcggcgcagtacaccaacgcggtgcgcgaccgggagctggacctccggggtgagtccgggggcgtgggcggccagtccccaggcggcaccgagccgccttattttccgcgctttgccgcgtgcaccgaaggccggagcttggcccgcgggccggttgtctgggctccgaccgggctgcgcagggaacgccgggcctgattcttgccgttgttgccagatgagcatccggttaagctcctgggagccttctgttagcgccgtgcctcttgacaggcacgggtgacttcattacttcctggtgcgtcctcgtggggccctgttaggccttgcttggctgtttcgccgctggctgtttgagggcccggaagagcggctcattaatggttgtaacgcaagtgcagggcgcgggattggttcttaatacttgccgccagatgatattttgagcgtagataggatatgtgttcattattcctaatgtgagggaggaaactaagtccccgaacaaccgcgattgtttcctccagtattttctacttagtagctttaattgtctggcgtttcccctatatgaagacgttttaaaaattgaactgtgtcacccaggcttgcaccgccgggtgctgtgtgtaagttgtggaagcgctcgcaattattcagattcctgtactatttcaaccttagcaagacttggtaagatactgggagggcagctagctagttggcatttcaggagacggctttaaaagggacgtgatagagcaacttctctgaggataagaccatgctgtcgtagcctgagatttgttcccatggggacctatggcctcggagcagcatcgctgcgggatctgcttagatttcttgccgacctttgggaaatcccactgttttgtgttgtgttgtgttgagatggagtctcgctctttccgccccagctggagcgcagtggcgtgatctcggctcactgcaaccgccgcctccccggttcaggtgattcctgtgtctcaagcctcccgagtagctgggaatacaggcatgcgccaccacgcccggctaattttttgtatttttagtaaagacatggtttctccatgttggtcaggctggtctcgaactcccgacctcaggtgatccgcccgccttggtctcccgaagtgctgggattacaggcttgagccactgcgcccggcccaactcaccacttttgatgatctctgccatttctctttatggagcatgtgcagtgttgagaatacgtattttgatgcagtacgtgtagtacagctctgaattgtgtcctttaactttgggtaagttctttttttagtagaccttgcttcttcggaatatttcttttcttatagtgcctaacacaataattatgcccaaattagacaaattaacatttgagtgttcacagatttattactgtatttaaaccattgatcttcaattctgaattggagctgggggaggggagggagaactgtcgtgatatgttgaggctgttctgatgggttctaagaatctggcctgtggagatgcaagagtggagaactgtcgtccacaatgtttgaacgccgtttgggcactgagactaagcagctccaagtgtaaactcctgttgtgccgattccgcttaactagcccaaacgacttaggacagtgtgaggcaccttgtaaatgttcttataaatgttagctgcctatatcagccattgttattgtccttgtccttgttgtcatcagattctaagcttcatggcactggggacttgagactcgttcagcgttttctctctagtatcttaaacagcggcaagtcatgcgtgacccgacataggtgctaggtaatacttcctgaataaatcaaagcctggagtcagatactatgaaatacagctaatgctttaaggggcaactgtttagttatattaatacctcttgtgtttttttcctccattttatagggtataaaattcccgtcattgaaaatctaggtgctacgttagaccagtttgatgctattgatttttctgacaatgagatcaggaaactggatggttttcctttgttgagaagactgaaaacattgttagtgaacaacaacagaatatggtacgtgtctgtaggggaaagtaattttttcccctagagtaaatgttgcagtgtttcctgaagaagttgtagcacgtgctactggttaaacctacatgtttctttttctttttctttttcttttttatttatattttgaaaaaatattttttccataatggaagccacattcaatacatgttttttcttaaaatgagaaatgaacttcacttttcctatagagatccagagattaacctggcattagtctagtcttacttgtatctgttcagaaatcatgtatttttattttcatggttaagtttctaaataaaaacatgttgctttgtatacattttggcttctaaaacaattatcaaaggggtcatagtaaaaggatatataaaggtaacaattatacttttgactgagcgtctctgcttttttttttttttaactgcaactaatttctagactgttacttattgaaattgagatcttttttgaccctgccttcatcagctctgtgtaaactttattggaaaaaaagcacttggtgtatagataatgtctttaaaggtactgggtggtgagtgggatttccttcagatagaaatatttctcataggttaaccattcccctatagtatagttgttgtgtcttgtacctgagctgggaatccagaattatttgtatttctgtgctgcctgcacaaaaaatcatgaagtgagttaagtagtttgtgccacccaggagttgcaccttttctcaggttccactagatggtatgacagtggaattagccccaggcagtgtctaaaatcccacttctgttgctgaccctgtggcctcagaaaagggttctttttgctttgtttcctctttatcagggtgttggaagaaggatctctaagtgtctctctgtgatcctctgagcaaggaggtagataaaattgttagcttatttaattttcacttttactaagactctatttttattttagccgtataggtgagggacttgatcaggctctgccctgtctgacagaactcattctcaccaataatagtctcgtggaactggtaagttgcacagaaggaaaatgtatttggtgggtggggttaaaggtactatgtgcttcctacagaaaatttacaaaatctagaaaatgatctcagtatcctctttcttgtctttttcttaattcaggatctgggccttttgggttctgcagccgtatgttgcaaatattttcctacttttacttgacttttgacttaggatgtcttgttagagaagttcctaatttaggtgcagtccaatgaatcaatcttcttctttattgtagcccttttgatgtttaaatttcccctattccagggttataaactcctatgttgttttctacaattgcagtgttcaatatagtaccagtaactacaggtggctacttataattgagatgtgctagaactataaaatacacactggatttcaaagacttaagtgcaaaaaaaaaaaaaagtaaactatctcagtaatttttttatatcgatgttgaaatgataacgttttggataataagttaaatggcatattattaaaattagtttcacctattttaacatggctactagaaaattttagattacatatctgatatgcattaaatcttgctgaacagttccagtctagaaaccttgttttactcttcacgttagatgaacaatccacttggaactgttttcatgctttttaaatttctgttctgtgtatccaatttttaacataattgagatactgtgtattgttttgtaacctaaattcttcacttaaacactggatgcttaaatttatattgtaggccaggtgccatagctcatgcctgtaatccaagcactttgggaagccaaggtgggaggatcacttgagcccaggagttctagaccagcctgggcaacatagtgagaccttgtctctctctataagtaatttttttagaaaagccgggtgcagtggctcatgcctgtaatcccagcactttgggaggccgaggcgggtggatcacgaggtcaggagttcaagaccagcctgggcaatatggtgaaaccccgtctctactaaaaatacaaaaattagccgggcgtggtggtgggttcctgtaatcccagcttcttgggaggctgagacaggaggattgcttgaacccaggaggcagaggttgcaatgagctgagatcatgccactgcactccagcctgggcaaagaaagagactccgtctcaaaaaaaaaaaaaaaaaaaatgccaaaagtggtagcgtgcatctgtggtcccaggtattccagtggctaaagtgggaggatcacttgagccctagccatcagtcgaggctgcagtgagacatgatcatgtctctgtactccagtctgggcaatagtgcaagacctcatctcaaaaaaaaaaaaaaatcgtataacttaattttgtgacttaaccttcctcccgtattttcctgattgttgagaatgaactgtgttcctttccttgtggacaaggtccatagcatccttcagattctcaaggagatgcttgactacaaacataagacagcactggtccatggccatgtcctttctgaagtgtgtgaagtattcaacccgaaatacatatttataggcaatgtgtctcatgataggtgctgttagagaaattagagttgtatttaaagctctttgcaaagatgaagactactgggcttatcagttattgagagaggtatgttagaatctcacagcatggtagtggatttgactatccctgaagttctgtcgattttagttttgtatattttgaagttgccttatttgatacatacaaattttaaattattcatatctttctggtgaacggaaactttttattatgttgtgaccctcgatctctattaatgctgtttaccttgaggtttcttttacctcgaaacaatctttgttttggttagttatatgcatgataaatcgttttccatccaaaatttactttcagcttgtctgtacctcttgtagtttagatttctctcttaaaaactgtatggttgaattttttttttttttttttgagatggagtggctggagtgcagtggcgagatctcggctcactgcaacctctgcctcctgggttcaagtgattctcctgctgcctcagcctcccgagtagctgggattacaggtgggcgccatcacatctggctaatttttgtattttttttttttttagtagagacgaagtttcaccatgttggtcaggctggtctcgaactcctgaccttgtgatccacccgccttggcctcccaaagtgctgggattataggcgtgagtcaccgcgcccagctctggttggaattttttacaatccagtctgaaagctcttttaagtgaattatttatatttagtctgtttacatttaatgtaattactggtgtgttccagtttgtcttctctctgttctggggcttcctgtctgtcccacccgttcttcaatccgttttctctcctttattgtagatgctctccttctgtcattccattttttcttctgatggtttagaaattactctctttcaatcttgagttagcatcgtaggaattaaaacacacatatttataaaagtttaaaattaaatgttaagatcactgtaccatgaccttcaacatttaattttaaactttgacacctttaccctgctaaacaatacagtacagtgaccttcaacatttcagcagccttcgggttgttacatatttattcttttttgaagcccatcactacatcgccattacgttttacactgtgtatgtaacaaatgttaccactttgttctttattcctttttggatcatcttcagtgggggtaaaacagtatcaagctctagagctccctctggtggtttttgtgacatatttgaagatggcagcttgctttttgagaatttctggctctgctctccctgtttttatctgtacttttttttctcattgtgcctcttgcacacacacaccccttccccaccatctacccaatttgcgcctgttccagcagtttctcttcagggcagggccgtgttgggacatgatttctattaagagtgagggcccaaattgctcttgcccctgcagcccttatcacagacccctgtagtcattattggaacatgctggtcttgggcctgcttttctcagtcactggagttctccagtttgtaagacggctcctcgcctcccctctgcttcttcctgtacaaaggccgtcaccctgcaagccttgttgctctcaacatgggttgtctctacttgttcctattttagagttactgcagaatgccttgccatctagcttggttgtagctggtaaccataggtttttgtttttttgctatccttattgcactatgttttatggaacaattggagaagattaaaaattcaccctgcccactgggcgtggtggctcacgcctgtaatcccagctctttgggaggccgaggcaggcagatcacgaggtcaggagatcgagaccatcgtggctaatacagtgaaaccccgtctctactaaaaatgcaaaaaaaattagccgggcatggtggtgggcgcctgtagtcccagctacttgggaggctgaggcaggagaatggcatgaattcgggaggcggagcttgcagtgagccaagatcacgccactgtactccagcctgggcaacagagcgagactccgtctcaaaaaaaaaaaaaaaaaaaatcaccctgccttctttccattaattcgatcatttttaagctatactattccttgtccctgcaaattttatttaaagagattttcaggggcagctaggataaatgtaccttctttcaaaagacagtatacctttgttgttcttagacgctgaagctggcgctagcaggaaagcccacttacaccaagattctggcttgcagttcccagtgtgaataggttgctccagagtcccatcagctttgccattgttttcttttccaaatcatggctcagcagccactttgagattcctgtaggaaagcaatttcttatctcctgctattgagacagaagctgttaatgccaagattttaagaagctcccatgtattcatcggtagaaattatttaaacatttgtgatgtgctagtattgggcttgttgctagagagtaaaaattcagtaaataatgaaaagacaacttgcttcaaaagcactctccatttcagaatctcaaaatagcgtgtggtattcgcgttcttacctgtggctattgcttgacagggtgatctggaccctctggcatctctcaaatcgctgacttacctaaggtatgggaattacatattgtgacaaaatgaagccctttaaaataacattacttttaccagccttgaccttaatgtaatcagataattaaaaaatgtggcacatatgcaccatggaatactatgcagccataaaaaaggatgagttcatgtcctctgtagggacatggatgaagctggaaaccatcattctcagcaaactatcgcaaggacaaaaaaccaaacaccccatgttctcactcgtaggtgagaattgaacaatgagaacacttggacacaggaaggggaacatcacacaccggggcctgttgtggggtggggaaaggggggagggaaagcattaggagatatacctaatgtaaatgacaagttaatgggtgcagcccaccaacatggcacatgtatacatatgtaacaaacctgcaagttgtgcacatgtaccctagaacttaaaagtataatttaaaaaaaaagtgccttttacaaagaaagattgaatatatttccttaatgttaaattgttacaatgttgcaatgtgaagaatgtgaatgttcccttgatttataggttccttagactattcaaacagacctcttgagtgctgtgccatgaacaagtttgccattgtgtcattccttttcttgtagtatcctaagaaatccggtaaccaataagaagcattacagattgtatgtgatttataaagttccgcaagtcagagtactggatttccagaaagtgaaactaaaagtaagtagtaatctgttgcttgtgagccattatagagttgtgtgtttttctttatatttttgttactgattattaaaattgtctaaatgagtaaattttaccattagtttgtaataaaagtgggagggaaaatgttacatcacatttttttctaatagcagagtttatgatagaacttttaagttggagctctcttatgtaatgctggctattccgaagttcgcaaagtgctgaggccacggtgagcagtcttaacagtggattgtctgcctagatacgttcccagcggagaacttaatgtaacctactttcgtgcagctccgtgtgttaggatgatttttccctttattaggaattcattattttattattcatttaattgccttcttagttccctgggatcccctccttggagctaggagaatgaactttcttcagggagctctaccaaagaaagaagaccactgtgtcttctcttaatttgaaattgctttttggtattttcaccagcccggagtactgtaggagagttcgcttccatgtcttctgaggaatgcatctaaatgcatgtggtattcctatttccattaactctgtgtgtggtgtcgctgtaggagcgtcaggaagcagagaaaatgttcaagggcaaacggggtgcacagcttgcaaaggatattgccaggagaagcaaaacgtaagacacggatatccaacttaactctacttcaccttcagaaacatgatctgatctgtctggcagttcgtctcctacaaaattaaccaaaaactctgacatattaatgtggtattaaatttgagtgcttatagtccatgtacatcaatggtccacacatcacaagaaatttctaccagcttagcagagcaaatatttcagtagtcagtcttcatgtgataccatgtacatcctattttctatataggaagatgaactggatggtgtttctgaaggagagagttcttgtatcagtttgttaacaaagataagatactacactggttgaattactttcaaaagcttttgaaagtaaaagagaagcaacttctgttggtctaggtctaacagttatgttcttccccctcttaagttttaatccaggtgctggtttgccaactgacaaaaagaaaggtgggccatctccaggggatgtagaagcaatcaaggtaatcatgtgttaggattcttggactggaatgagctaagatgggttcagaacacaaagctggataataaacatgttccgaacattgcagatttcattttcccacagttattagcatacagcaatatttctgtttaaggaaaaactagcataaagttattatttgatcagacttgaaattacacaagctaattaatgtggaggcagctttgtctttctcattttccaaggtgcatttatcacttcgaacagttacttaccttggtatgctgtctcagtgtttgccttaatttttactttcgaagatttgctgtctggcaaatccttttgactgatcagtagggaccctcgttttataatattgcctccttaaattattcagtaacataattgcaaatagttacttcacttagctacgattttagaacatgtggagtgattatttataagaaggcctgcatctcttcaccaattttagaaatttgtggtttggcttctagttttatttttgtgggccaataacattcttccccctacaccaaagtatttaatgttcctgatggagaagttgctgtgaatttctgtaggtgattgacacttagttttctgggtagctgatacttggttgaagttaatcatccatctccattgccctctgtcctccagaatgccatagcaaatgcttcaactctggctgaagtggagaggctgaaggggttgctgcagtctggtcagatccctggcagagaacgcagatcaggtgaacaaatggtgttctttgtatgttcaaattaatgttacactcagagtgtaactcacaaccatttagatgccatgactctggaatgccagagtagtgcctccttacatcaaatctaatatatgaaatctctttaaatgctctttgaagataaagtatttgatgggttgggtgcagtggctcacgcctgtaatcccagcactttgggagcctgaggcgggcggatcacctgaggtcaggagttcgagaccagcctgaccaacatggagaaaccccatctctactaaaaatacaaaattagccgggggtggtggtgcgcgcctgtaatcccagctactcgggaggctgaggcaggagaatcgcttgaacccgggaggtggaggttgtggtgagccgagatcgcacttttgtactccagcctgggcaacgagcaaaactgcagctcaaaaaaaaaaaaaaggtatttcatgaagaaagttaagttacagcactgtggggggttttatgtaaaagttgaagctagaattacttcagccatggagtgcaccgaacactagcgatagccatgtggacttttacctatatatatttgcgtgtgtgcatgatacctcagtagttaggaacacaggctctagagccaagcagtccgaggcccaaatctcagcttcaccagctctgcctttggacaagtttcttcaagtctttcctcatctttaaatctgagataacaatagtagcaaacctcaaaaggttgccgagaggctgagagactgaacacagcacaaggctcaacattagcgagtttttgataagtggtaactgttctgacatctgaatgcctgctttatgctaggctgcatgtggggcactagggatataagataaaaagtactgaaatacgtcttacaagttttgatatgaatgtaactggggacagccactcagactgccgtcttggggaagtttcctagggaaataatgtttgagctgggagctaaaaattaaaaagacatttttttcctttttgagtcggagttt

SEQ ID NO: 5690 - DNA, 58057 bp, Homo sapiens
  HAGH gene - 1799107 - 1817163 of chr16; NCBI Entrez Gene ID: 3029; Build 35; sequence includes 20,000 bases upstream of initiation codon and 20,000 bases downstream of termination codon of the gene
tttttttgaaatggagtcttgctatgtcgcccaggctggagtgcagtggcgtgatctcggcttactgcagtctctgcctcctgggttcaagttattcccctgcctgagcctcctgagtagctgggactacaggtgtgtgccaccatgcctggctaattttttgtattttagtagagacggggtttcaccatgttggccaggatggtcttgatctcctgacctcgtgatccgcccgcctcaccctcccaaagtgctgggattataggcgtgaaccaccacgcccagcccatcatctaggttttaagccccacatgcattagctatttgtcctgatgctctccctcccctcaccccccattccccaacaggccccagtgtgtgttgttcccctccctgtgtccatgttatctcattgttcagctcccacttatgagtgagaacatatggtatttggctttctgttcctgtgttagtttgctgagaatggcggctttcagctttatccatgtctctgcaaaggacatgatctcattcctttttatggttgcattgtattccatggtatacatgtaccacattttctttatccagtctaccactgatggtcatttgggctggttccatgtctttgctattgtaaatagttatatcagttttacttttaatttcctgggctacacctgccttatagaaattaagaagctctaaatggcttgtgttcatcctagccaggtgtccagattcccttgtttctttctctgccctgagagtgcttatcagatagggagggcacaattcctgcctttctctgacagtcaggataacgctattgtcagtgaggacctgcagtgctggtacccacccatccctgccagcccccatcacaggaagctcattggctggatttctgtggcctcactccagcagatgttcccatctgaagcacagcaattcatgatgcatatctctccaagttaatagagttctgcattcattcattcgcccatgaccttatcagtatttttgaatgccttttacttgccaagaattgagataatatacatttctggaacaaggaaggagatgagtggctggtcagatggatgtgaggatagtcatcacgtgggacactgcgtgctggcaaggatttgacaacctagttctgagaaagaacaggtaggagacttgtattctgggagcaaggaggaagaaatgcccagatcttcccaggggagttaggaagtacagacattgtcaggacaatttgtaaaatattcaggggggcctggggtacttaatcatatgccggaggctggggtcctggggtccaagggcatcatgggggagctctttccaaactcgcgttcctgccttctggcacagcacccctgacccttgagcacactcatgtgccaatgtggggagctaggctttttatagagcctattttatatatttcaattgccttttgaaaaccttttttttatgataagtaaagaaatacgtataaaattcagaaaaaatatatagaaacataaacaaggaaaacaaagatcacctacaatcccactgtctagagagaatcattttttcgtatatattcttccagataattttgcatttatatatgtatttttttttttagacagagtcttgctctgttgcccaggctggagtgcagtggcgctatctcagtttactgcaagctccacctcccaggttcatgccagtctcctgcctcagcctcccaactagctgggactacaggcgcccaccaccacgcctggttaatttttttgtatttttagtagaggtggggtgtcaccatgttagccaggatggtctccatctcctgaccttgtgattcacctgcttcagcctcccaaagtgctgggattacaggcgtgagccactgcgcccggtcccttatatatgtagattttttaattaaaagggtattgaaccacataggttagtaagctgctcttttcactaacatctgttttagatgtaatgtggtgtacatctctctatgtttacagaattctacatcacattgttaatggccacgtaatattctatttgattgtattcttacatgtcttcactttttactattaaaatgattttggatgatttaaatgtgatttaaatgataatcagtttgctttttacttattatgcattttcaatttaagatataccagaagctaacattctgctgaattttatacgagaaaataaagaaacgaatgttctggatgatgaaattgacagttatttcaaagaatccataaattgtaagtgaccgtttaaatatatttggatttttttaaaggccgaaattgggcctgtaaaggtttgtttgacatggtaaaagataccagattcctattctgtaactactatatttctactttctaaaggtagcttaaaatagtgggcatctttttctttttcttttgagcccaggagttcatgagaccagcctggccaacatggcaaaacgccgtctctactaaaaacacaaaaattagccaggtatcatgggatgtgcctgtaatcccagctgctcaggaggctgaggcaggagaatcccttgaacctgggaggtggaggttgcagtgagctgagatccagcctgggtgacagagcgaggctacactccagcctgggtgtcagaacaagactgtatctcaaaaaataaaaaaataaaagaaacacaatacagaatgcttggccaggtgtggtagctcacgcctgtaatcccagcactttgggaaaccaaggtggagggatcacttgaggtcaggagtttgagaccagcctggccaacatggtgaaatcccgtctctactaaaaatacaaaaaatgagccaggcatggtagggggcacctgtaatcccagatactcaggaggctgaggcaggagaattgcttgaacccaggaggcggaggttgcagtgagccaagatcacaccactgtactccagtctgggcaacagagcgagaccccgtctcaaaaaaaaaaaaaaaaaagaaacataatacagaatgcaacaaagagccccaaatagttatttggttaacatcttttaatctatctttttgtgcatatatactaatagaaggataaagacataaaaatattatagataaatagatacacatcaccatctttttattgaagaaaattaaatttcatgcactagacatcaacaaaagaaaagaaaccaatgaagtgctgaaggaaccggataagttctcataaaagttttctaacccaagtaatattagttcctggaagattcttctaagataaagaaaaataaaaatgaataataggttattgtctttagttttgtaaagtttatttttgttgttgcttcacatcctcactaatgttgtgttattactcttttaaatgttaggtgtttagtggaattctctttttttttttttttgagatggagtctggctctgtcacccaggctgggatgcaaagccgcgatctcggttgagtgcaacctccacctcctgggttcaagcgattctccttccttagcctcccaagtagctgggattacgggcacacactgctacacccagctaattttttatttttagtagagacagggttttgctatgttggccaggctggtctcaaacccctgacctcaagcgatcgaccagtctcaacctctcaaagtgttagaattacaggcatgagccaccacatccggcctactcttgtttaatttgtattttcctgatgattattgaggcccagtacgtgtattggccattttgataacttttgttttgtgatgtactttatttatttattatttttttttattttattttttgagatggagtctcgctctgtcgcccgggttggagtgcagtggcgcgatctcggctcactgcaagctccgcctcccgggttcacgccattctcctgcctcagcctctggagtaggtgggacgacaggcgcccaccccacgcccggctaattctttgtatttttagtagagacagggtttcaccatgttagccaggatggtcgcgatctcctgacctcgtgatccacctgcctcggcttcccaaagtgctaggattacaggcgtgagccactgcgcctggctgtgtgatgtacttttaaattctcttccccatttaaaaaattgagtcagtgtcgccgggcgcggtggctcacgcctgtaatcccagcactttgggaggccgaggcgggcggatcacgaggtcaggagatggaaaccatcctggctaacacggtgaaaacccgtctctactaaaaatacaaaaaaaaattagccgtggtggcgggcgcccgtagtgccagctactcgggaggctgaggcaggagaatggcatgaacctgggaggcggagcttgcagtgagccgagatcgcgccactgcactaccgcctgggcgacagagtgagactctgtctcaaaaaataaaaaataaaaatgaaaataataataaaaaaaatcgagtcactgtctttttgagatggagttttgctcttgttgcccagactggagtgcaatggcgccatcttggctcaccacaacctccacttcctggattcaagcgattctcctgccttagcctcctgagtagctgggattacaggcatgcaccaccatgcctggctaattttttttttttttttttttaagtagagacagtgtttctccatgttggtcaggctgctctcgatctcccaacctcaggtgatctgcccacctcgacctcccaaattgctgggattacaggcatgagccactgtgcccagctgagtcactgtctttttctaattgatatttaagaattctttagataattctggatgagtcctttatctcattgtagactgctagcatctcccactctgtggcttgccttttcactttttaatggtgtcttttgatgaacagaaattcttcattttaatgaagactaatttcatttcctttttttccttatgttttgcttttatgtccatttatagaatcagtgtttatatagccaacatagtaatttttctgttacttaagctactgcatgttctcatttgtcatagctttccattcggatgtaaccttttatattttttagaatatatacagaactgtaatacttctttctgtttttagtaagtacaatagttgatgtctacacagttgaacaattaaagggaaaagctttgaagaatgaaggaaaagctgatccttcctatggcatcctttatgcctacatttccacactcaacattgatgatgaaactacaaaagtagttcgaaatagatggtaaggatccgtgtcacttttagcaaattcatttttgtaagaaataattattgttaataaattttaagctctctaaaagttaaagctgtttgttgatgtaacaggggttatgtattggagataaatgtgtaaaaaactgtactgaaaagtttccatagcaaaccagattaaaatattataattgccttttaaaatataatctgtatttccataattctaacatataaagatataatgtgagaaacttttgacaaacttgtctaatgatttggcagaaagctattttggttgctaggccctatagcaatgtagtgacagcattaaaaaaaaattattttcaagccaggtgcagtagcatgcgcctgtagtctcagctactcaggaggctgaggtgggaggatcggttgagcccaggagtttgaagagtttgagtccagcctaggaaacatcaaacctcttgtagatcgaagttagtatttacttgcatagaaagtaaactgcaggccgggcacggtggctcacgcctgtaatcccagcactatgggaggtcgaggcaggtggatcacctgaggtcaggagtttgagatcagcctggccaatatagcgaaacaccatctctactaaaaatacaaaaaattagctgggtgtggtggcgggcacctgtaatgccagctactttggaggctgaggcatgagaattgcttgaacccaggaggcggaggtcgcggtgagccgagattgcaccattgcactccagcctgggcgagaagagtgaaactctgtctcaaaaaaaaaaaaaaaaaaaaagaaagaaaagaaagtaaactccagtagatttaatactcttagctaaaagatgcttggcaagaaatgtgtaatattattaggaaagtctctctatggatttttataactgaattttcattgagataatcctagattcacatggatgtataagaaataataagagggctgggcgtggtggctcacgcctgtaatcccagcactttgggaggccaaggcaggtggatcacgaggtcaggagattgagaccatcctggctaacacggtgaaaccctgtctctactaaaaaatacaaaaaaattagccgggcatggtggtgggcgcctgtagtcccagctactcgagaggatgaggcaggagaatggcgtggacctgggaggcagagcttgcagcgagccgagattgcgccactgcactgcactccatcctgggcgacagagcgagactgtgtctcaaaaaaaaaaaaaataataataagagagatcccttgtggcttttgccccgtttcccccagtgttaccattttgcaagtgatagtaccatgtcacagccaggatatcaacaccattcaatccactggtcgtattcagattcctccaggttcacatgcagtcgtgtgtgtgtgttctcattagttttatcacacttgtaagtttgtgtatctattgccacagtcaagatattgacctctgaatttttaaaacattttatgatgtggtattaaagttgaaaaaagtaatgtggaggatgctgtgtaaggccttgtattcattttttgaaaaatagttttcaaaaattgaaaaactaatttttttcctgtacatttattattgatatctgaggaaaagcatctaaaatttgctagaccaagtgatctgtggctagataagaaaccactatcttcagttcatttcccctatttgagaaatttgaattagtttccctgtttaaaattgctaaagtaaggcttgcttcagaaatatggaatagcataaatcactgaaagagaggagagtgtatcaccagcagtgttaatagcatctgggtgctacccggccagccttgcaaggctttctgtatttgtagagaaggccccgtgcaggcccatccagtgagcagctgttgaactcgtgctttccaggcacaagacacagttcctgccctcagaactcccagccagggaggtgagaataaggagctgatgcaacagcaccagtcagtcctgaggcgtgcactctgctgctgttccaagagagaaaggctgcaggctgggatacgagaagggagggccccagcaaggaaatgagactgggatggacctcgagggcttggcagagggagggaaggagggcaggcagaggactggtgtacgcagtttcagatgactcctgagaatggctgcgtagaaagtgtgttttactgttttttacgactgtcttgtagaccgcatagcactgaacactcagtaagttttccacacactgtcgtagagtttttagtgacaattctttttctgctacagatgaaatttgtagcttagggcatcacattttatcattgtctttgtttcttttcagttccagctgtggttatattgtaaatgaagcatctaacatgtgcacaacttgcaacaaaaactccttggactttaaatctgtctttctcagtttccatgtgctgattgatctgactgatcacacaggcacccttcattcctgtagtctcacaggaagtgttgctgaggagactttgggctgcacggtaaatagcaaaaaggaagaaatgtttagaatatttccaaagtgaatgctttttcccaaaaaaatataggttgttttgtcaaacatttgatagaaattgattcactaataaacagcctgggaaaaaatcatcttgctttaaacacacattgctttgatgaacaaatgttacatattttatatcaaaatcctagctaatatttactattatgagtaatgactgaggccattagcctaaatggataaataaacatgatgttttagggctgggcaccgtggctcacgcctgtaatctcagcactttgggaggccaaggagggcggatcacttgaggtcaggagtttgagaccagcctggccaatatggcgaaaccccatttctactaaaaatacaaaaattagctgggtgtggtgacgtgcacttgtaatcctagctactcaggaggctggggcacgagaatcacttgagcccaggatgtggaagttgcagtgagccaagatcacgccactgcactccagcctgagtgatagagcaagacttgtctccaaataattaaaaaaaaaacaaaacactaaggaaacatgatgtttgatatagtcaagtaacgatgggtaaaacaacaagtcggagatgttgatcagtcataaggtggtttttctaggaagatttggctgtgtttcacctactcagttacataaagtcagctacacgttttctccttgatttgcagctatacaacagcagcagatacttagggattagcatgtgcatttggcaataggcacctgttttttattgttaaaaccagctcatgaaatttaccattagactttagttccaaattctgcttccactttattgaggggatttttccttgctgagatacctgattacctttggagattttgcttatatagcctttcctgccttatcttctctatcaaaacagttgagttggctgggcatagtgggtcacacctgtaatcctaccactttgggaggctgaggcaggaggatcacttgaggccaggagttcaagatcaccctgggcaacatagtgagaccctgtctctacaaaacataaaacataaaacaattagccagagaagagtagtgcatacctgtaacctcagaaacgggaagctgagggaggattgcttgaccccgggagttcgaggctgcagtgagctgtgatagcactgctgcactccagcttgggcgacagagtgagaccctgtctctacaaacaaaaacaaacgattgagctgtaattactgcaaataaaatttcatttctaatgagaaagtttgtttcacactgttgtcaaaaatgaattttctttgtaaacttcaaatatatttgtctcatattttttttttaaccaggtacatgagtttcttgcaatgacagatgaacagaaaacagcattaaagtggcaatttctcttggaaagaagcaaaatttatttaaaagttagtgcattttatagtcccatattattctatatatttattattctgtatattcaaaccataagaaaaacctagataaattcgagaatttattatttctaatgcccagttcccagatgtgcataaggattcagctatcctaaaagcaaaggaaatagccaggggttttttcatattgtataaaggagttaccaaagacatcaaagaaaatagaccaacaaagaaaatatcctttaaggttaaatccaaaacaggggaaagggctttaaaatcagagctgatgggtgcaatagtacacacctgtaatcccagctacttggtaggctgaggtgggaggatcacctgaacccaggagtttgaggccagcctgggcaacatagtgagacccctctcttggcccctgaaccccaaaaggtcagactaggttgtccccacccccacccaccctgtggtgttcccttcagttagtgaggcagtgtaagatagcacaattaagtgcttgggttgttgcggggagacagatttggtctgaatcctaatcccaccacacctcagcctgtgagaccctgcagaggttaattaaatttgctaacctgcaaaattccatgatcctccaaccctgaagggccacagttgcctcctgaggcacttcagtgttggaggatcctcgagtctttgtgttcaaggtgtcagaggaggaaaagtgcagtgagacaaactcccctattgcagatgagaaaagtgggaccaagaagtgttgccacttgcactgggtcacaggtgagactggacccagccagcctagttgcttcacttcatggttctcaactcttttctcttgtattctcccgcaagttaatgtgctcccgtttgtgtggttatatctactgatacttgctgtactgcagcttaatactgaaaaaattttaaaacattctagagcacacattccatttgtgtcagactaatggtatcatggagcctctagaaaacattgcgtgctgatgagagaattagtgttattatgaaattagttttcatctcatggacatcctgcaggagcatttgtgaatgctgcatctcctccatctcagcctcataagcaggttttcccattttccatggccaccaacacatctgaatagtttgcagacatggagtctccagtggccttagcaatatttctaggacctcggcttgaggcctcttcactaccaggccaaaggcagtaaagttgcagtaagatgctgcatctcttcaacagttagcatgggcccctaaatactgtctctttgcaagtcagggcatgcttaggtccttgaccgaccctgtatactttccctccagacaggaggcaccacttgctaatgagtctgatcaacttaagttcatgggaacttaagagttttctaaatttgattcaaatacaacaatgaatgaccctcaagtggatactgcactttcccagagaatgtgtgtaacagatgttccaggtggctttaacaaatattcataattatggacaagctgcttcgtgcattaggtaacacagtattttacaaataaaaagatgtaaaatccaaaaccaaaatccaaaaaccatgatgcatacaaaaataacacatgttgaagatttaactcattaattaatgaggggaccagtaagatataggggagaagaaggattcaaaggggaattggttcatgaccagcctgtccaagatggtgaaaccccatctctgctaaaactacaaaaattagccaggcatggtggcaggtgcctgtcatcccagctactcaggaggctgaggcagtagaattgcttgaacctgggaggcagaggttgcagtgagccgagatctcaccactgcactccagcctgggtgacagagtgagactgtgtctcaaaaaaaaaaaaaaagaaaaaggaattggaagaatagatacataggcaggcaatgcaaaatgctgaatgggtttgcttgtagatgaacctctgggctcctctatagggcagaagcagtgcatcttcactcagacagacttcatggggattccatgagcagggtcattcgaatcactgtcagctttctacaacctagttctaaaacagctcagtccgtgcaatgggaggtgtagcccctgtagaatcagacagctctgaacgtgttctagccaatgtcagactaccacaacattccattgaaagggtacccacttattgttattgcccacttaaagtctttcccagttttccctgatgttggtacttttttttctctcagtcttgaaattaaagtggttgatatgtccttccactctatattaaataaaatgttggttaaagtgctgtataaattataaaaaataagactattaaaataagactattattaaattatgtcatcatattcctgtagtctcacagattgagtccctgctacagcttaaagtctatcacagttggtagtttgaacacacattaagccctttttcatatgttatacttttttttttttttgagacacagtctcactctgctcgctctgtcacacaggctggagcacgtggtgcgatcacagcttactgcagcctcaaccttcccaggctcaagtgatcctcccgcctcagccaccgagtagctgggaccacaggtgtgcaccaccacacctggctaatttttatatttttagtagagacagggtttcactttattggccaggctggtcttgaacttcaggcctcaagtgatctacctgccttggcctcccaaagtgctgggattacaggcatgagccacctcacccagccctgcattagacattttttttagtgggggggggtgggggggacagagtttcgctctagttgcccaagctggagtgcaatggcacaatctctgctcactgcaacctctgcctcccgggttcaagggattctcctgcctcagccttctgagtagctgggataacaggtgtgtgccaccatgcccggctaattttttgtatttttagtagaaatgggagtttcaccatgttagccaggctggtctcgaactcctgacctcaggtgatccacccgccttggcctcccaaagtgctgggattacaggcgtgagccactgcaccagcacccggccacattagacttttaatcccaactttcctacctgagagaaatagcatgaaaagtgacaaaatttttacaaaatcagtcagaagctgggcctgtaaattaactgtactccgagactggaactcttcccatcatcttacagctctaatggaagtttatattagtatctgtaaacaaaactttcattgcagttctctattcgtgatcattgatttttcaacttgatatacaaggggattttaaaaattaaccttttgtctctttttctgtttctcctcgcagttcgttctatcacacagagcaaggagtggattgaaaattagtgtactctcgtgcaagcttgcagatcctactgaggcaagcagaaacttgtctggacaaaaacatgtttaaaacggtctatcattttgaactctggaaaagtataagagttttaactccctttaaaatggaatattaatttgaaaattatggggaaaattgcattttgtttacatgtggtgaacatgtttctagaaattgttatggtggaggtggtctgggtgagtctgaaggcctctctcatctgacctcccttcttagaaggcctcctactgtctttgccttgtctcctcccaagttggaaaatgtttacatgaattaataaacagatttaatcttctacagatttgaatgatttattttcttttccatgtagttgaacggctttgagtgagtttcttaatcctgagtgaatgatttattttcttaagccagtttattatttgtcttggttccctggaaaaagagtaggacctcaagggctgggcacggtggctcatgcctgtaatcccagcactttgggatgccaaggcagtcaggagatcgagaccatcctggctaacacagtgaaaccccatctctactaaaaatacaaaaaattagctgggtgtggtggcacgtgcctgttgtcccagctactcgggaggctgaggcaggagaatctcttgaacctgggatgaggaggttgtagtgagctgagatccagccactgcactccagcctgggcgacagagcgagactctgtcttaaaaaaaaaaaaaaaaaaaaaaaaagtacctctaaagactactttctgagagctgggtggtgactcgtcatctgacagatctgacaggatgagggcaaggggctcttggtgctgggtgggaatagccaaagtcgtgggcaatcctgtgcgactgctttgagcacctggggctcttctagtccctggtcttctctggtgacacactggagtgcccagtgcttgtggaggcttgctggctcagggctgacatgactgagtctgaatcaactgggaggagaccaacttcaaaaggttcatgagcatgcctgggtctcagaactctgagggggacctactcaggacatgaggacgacagctgccactttatctgtttgctttgcagcagccacaaagtaaacggctcaactgcacaccattgagagtcacttgcttcagggcgcagactccagctgtgaagacccaccgctaaggtcagtgttgacccacggcctgggaggtttgacctggtactttagaaggctacatgccctccaccacaggattgaaaaaaaaggaaaaagtgagtatatgaaactgtttcctaaggctggtgttgggagataaaccatcgtcagtcatgttttatctggcttttaccatgtgcagccacagaggagggatgcaggttcacccctaagtgtccaaattgtggtgataaggtaatgaacgacttgacctagttgtgcagaacaggccttccatcctcccttggggagaactggggggtttgtgaagccaggtgaatggggagggtggacagggaaggaaggagaggagagaagtgagggtgtcgtggttggtgctggcttggctcccactgttggttcagcaagagtgggtatggtgccccctccactgagccccgtgtccaggagctcaggagaagccaccttactcggttaattttaaaacattttgtagagacagtgatcttggcattttgcccaggctggtcttgaattcctgggctcaagtgatccacccacctcggcctcccaaagtgctgggattacaggcgtgagccaccgtgcccagctgacacttatatttttaagaaaaagaggaaaataggccaggcgcggtggctcacgcctgtaatcccagcactttgggaggctgaggtgggtggatcacgaggtccggagatgtagaccatcctggctaacacggtgaagccctgtctctactaaaaatacaaaaaaattagccgggtgtggtggagggcgcctgtagtcccagctactcgggaggctgaggcaggagaatggcgtgaacccgggaggcggagcttgcagtgagccgagatcatgccactgcagcgtgggcaacagagcaagactttgtctcaaaaaaaaaaaaaaagaatgaccatagccatgatgcccagccttagctggggtgtcggtgtaaaggtattcttaaacagtcttgtcaagtgcaacatggtagttttttttcctctgcaatttggcaaaaagtgtcaaaatttcaaagtgcaaaccatttcattgatttcacttctaagacttccctaaggaaacaaacaagtgccaatgatgtagagcagcggcccaaactttttggcacctgggaatggtttggtggaagacagtttttccacggattgccgggtcggggggcggggatggtttcaggatgaaacagttccacctcagatccaggcattagatactcataaggagtgcgcaacctagatccctcgcatgtgcagtttacaaaagggttcacgctcctgtgagaatctcatgccaccactgatctgacgggaagcagaactcgggcgggaatgctcacttgcctcctactgtgtggctccgtttgtaacaggccacgggctggtagcagtcagtggcctggaggttgggggacccttgctgtagagtatatggaggatgccccttgcatcattgtttctaatagcagagcatctgaaaagtgtgcaatctgtcggggatgctccacccagaaaatcttcacttgctgaagtccctcagcttctatgagggtcagaaaattacctgaggaagctatggaaagggcggggagagcagattctggtgccaacagactcctcgctccagagcttccccttgggttcaccagctgactgaagctgatatccagcccagagaccactttcttccttggagtttgctccctgccctttctgcttcattacgcttctcttctcctgagagcactccttcagcaaatcacgggaacaagaatccccatcttaggctgtgcttctggggtacatgatctgagatacagccattaaaaaggggtacctgtacttatattcactgacctggaaatatgttcgtgatatattaagtggatgtgtaatactcatttttttataaaaggccaatcaacatgttttaaaaacacaacagaagaacagatgtcaaaccatatattctgtacagactaatacactgtggaattattttcttaagcgtgataatggtctcatttccatgtaggagaatatcctgattcttgggagatgtatgctgaaagggaagagtctttctgcagtcaccatcccgacgcatttccaaaatatgggtgtgtgtgtgtgtgtgtgtgtgtgtgtatagagagagagaggtgcatgtctgcatatatacacatatatggcggggaggaagggagagacgtaggaccagaggacaaacatagtgaatgctggtaattgttgaaactattaaagggcatatggagttcattgtattggtttttaaactttttcataggtttaaatgtattcaaaacgtggaaaaacgttatcttctgaatgctaggattactatgattttagcaatatcaggaattgtcggacttggtgtctctgtttttgattcttgcatctaaggactttgtgtgcctacacctgcaatgctgatgtcaatgtttgtgacaaagcttgttctaccactgtggtgaacactgaccccaggggcactgtactcggtgctggcttgtgccacctactagggctgcatgtgagcactgcttctactttataactttgactttaatagtctgtcaacttggtagctatatctcagctgaaccgtgtacctggtagcagactaataatacacttccagcatgagcacgccctttgatccaactcttccacttatgggaacctagccaaaggaaaaaacagcacatgtgctgatactagcaaatcattagagacaatctcaaggtccaaaaatggaggcttgacttcagaatcttatgcaatccatgaaagttgtactgcagaaatgtgtcagctaacaaggaaaaagatggtcacaatatacagtgaaataagcaagttaaataattgtatggtatagctgggcacggtggctcatgcctgtaatcccagcactttgggacgcccaggcgggtggatcacttgaggtcaggagttcgagaccagcttgaccaacatggtgaaaccctgtctctactaaaaatacaaaattagccgggtgtggtggcgtatgcctgtaatctgagctacttgggaggctgaggcaggagaatcacttgaacctgggaggcagaggttgcagtgagccgagattgtgccactgcactccagcctgggcaaaaagagttaaacgccatctcaaaaagaaaaaagaaagaaagaaaaaaaagaaaattgtatggtatgagcaaactctatttaaaaaattacaattatatccacagacttggaagaacttgcaataaatgcttaactttggctgtctctgggtagatgaaatttttggtgttttgttctaattgctaatctctattttctgactcttctgtaattacatgcattgccaagcaatgaaaaaataatactaaaagtagttaagatagcatgatacttaataaagaaatccaattatggcacttcctcatactatattataatttaagcatggggttgcagcatacctaagtgtctgattcttcttatgtatctacttacaagatgcagcctgcattgtggtcaaaacttcacgttctggtcttgggggagctgggttacatctcggctctgccactaagctgagtgactttagccagccttcgcagcctctagatctgtcttcatctgagtaatggggatggtagtgatcatactaagcttatggcttggttgctggttacataacacgtggaaatacagaataaactgcttggcatggtgcctaacagtactgtgttcaatacatggggaccgttactactcaatcagatgtcctaggctttcttcaggggccagcagatgatgtgaacgcgaacaggaacccctgccgaagcccaaaggactcctccaggcattgacagctatgctgtgcatcttgcctggatgttttttcagaggagggtgcaggcaagagcaaaagcagcagtcccaggctattcaacttccacaaagcctccttatctccggttgggaagtacagttgctgattaactgtgttaacacagcacagtgctcagaaggccaaaggtcaaagactaaggtctgaagccccacaaggaggaaatatccctcctcgtcattactggggggaaaaaaattacccttgtaagccacttagaagggagcacctttatttggaaaacagtaatttcaaaatcatctcccgaactcagaatcgatgggtctgggtagataccctaagtaaacaggtgaaatcttcattacttgttcacttattaagtaaaattttaaattaaccgattatgtacaggagtgtttttcacatttcctgataagaatcacttggaatgccctgtaaacacagcttcactggagattaatcctatcaaattgattcagcaagtccgagatgggccagtaatttgtggagatttttatttttacaaatgcttcctgatgatgaccaaatctaagaaaatttggtaaacaacggaaagttatctggaacataactttcagttttctctgcagtttttaagtgctgaactactgatcatcctagagataacccactgaaaagtcttctctaatccagttttacaaaaggaaagtctttttaacatttggtttgataaaatgttttccgaagaaatactttacttgcctgttttcatttctggcccacccgttctacttcacgttttcttgaagggttcatcttctatgagttgaggcatagcaatctaatcatttttaaaataaatggtttctttttttttttttttttttgagacggagtctcgctgttgcccaggagtacagtggcgcaatctcagctcactgtaagctccgcctcccgggttcaattgattctcctgcctcagcctccagagtagctgggactacaggcgcccgccaccacgcccggctaattttttgtatttttagtagagacggggtttcaccctgttagccaagatggtctggatctcctgacgtcgtgagccgcccgcctcggcctcccaaagtgctgcgattacaggcgtgagccaccgcgtccggccaataaatggtttctaattaaaggattgtgacatttaatagccgttgcttgctcttgtcttgctcccttctctctcgaaacttgttaagaaataactcaatattctggcttttccactttaaatgtcatactgaccagcccgtgtatgccagcctcgatctcatcgttttctttaaccggtccaactccctttggcgtcccagtcaagataatatctccttcttccaaggttatgatcttagaaacatagctgatgatgtaggggatggaaaaaatcatggaggatgtctcaccctcctgtctgagttcgccgttgaccttgagccagagcttcagcttgtgagggtcagggatcttctccttgggcacgaacgcgctgaccgggcaggacgccgtgaagctcttcgccagagtccagggcagccccttcttcttgcactcgtcctgcacgtcccgggcggtcatatccaggcacagggcatagccgcccacgtagtccatggccgcagcctcggggactgcgcggcagcgcttgcccatcaccacgcccagctccagctcgtggtgcaggttgcgagtgtacgcgggcatgaggatgggcgagccctcgggcgcgtaggccgtggacggcttcaggaacagcacgggctcgctcaacaccgcgctgcgcatctccctgacgtggtccgcgtagttcctccccacgcagacgatgttctttccccactcccagaagcgggacaatggcctggatgctgccatgattcccatcaagtgcccctgtagtcacgtgggctgggccggtcagctgatgcctacggcatcccggagaggaccaactgcctcggaacgctgtcccccgcagcgacggcccgttccacctcgcgatctgccgggtacccgggcggcgtggcgctcggcctccagggatccactgtgcggtgccaaaaaagaggcggaggctcgcggcacagctctcccggcgcagctctcgggccgccgccgccgctcccaggcccgtctcccggcccgtggcagtcggggctcgcggacaaaacaagttgagcgcgagcgcgttgattggttggcggacggtgcgaggtggacgctgattggctgagggcagcgcgaggcgggcgctgattggctgcgacgcgccgacgccggtgttttgcagtcctgggcagctcggcagtccagcccggcccgggtcatggtggtgggccgagggctgctcggccgccgcagcctcgccgcgctgggagccgcctgcgcccgccgaggcctcggtgggtgcggcggggcggtgcgggccgggggacgcgggcctggcggggcgggcagcgggcggcgccgggccgtcgtttggcgaccgctgacgcggtgtctgttgcgcaggtgcctaaggccgcgctgccgggctcgagcggaggcggcgcaggcgctgaggctggcgcggagcgggcgcggggccgcgggtgcggaaagcgctaggtaagcagggccaggcctgcgtccgccgcggcctccacgctcgggctgggccggccgcgcccctgacgcctccagggcatcgcgtcctgcccgggccggcgccgaggagagcctggggcgcggctctgaggcgcagcgggcagggccccgggacgcctggcccaccccgcacctgctgccccgctgcaaggaccgcggtctcgcggcgccgcctgcggtggtggagctgcccgcccggcgccggagcccccgtctggggacccggcgtgtcattcgcccgaggtggtcgcgcggccgggccaggccagcgccccgggcgggtgcgcagcgcagggcactgggcgggcggaggcgcagacagggaggcgtccctggcggtttccagatctcgccgaaagctgtcaaggctctgcagggggtagaatgtcgccattgctaaggaaaggacatggattttgaggtcctcagaattacagttttagggacattcataagggtccaggcagagagttccagcgggactgtgtgcatcggcagggcgtgcgtaccccattctaagggaggccccagcccccgtatttggtgccgcccagttcaagggaagcaagatgctgtgaaacttcctgatttaaaaaagaagtgcagtgacgcacgcctgtcatcccagcactttgggaggccgaggcgggaggatcgcttgagtccaggagttccagaccagcctggcaacatgttgagacctcatcgctacaaaaactaaacaaaatcagccgggcgtggtggcacacaactgtagtctcagtcactttggaggctgaggtgggaggatcgcttgagtccaggaggtcgaggctgcagtgacccttgatcgcaccactgcactgtagcctaggggacagagtgagaccatatctcaatttttttttgtttttggggccaaaccgaacatgtttctggacttggtccaggccccaggctgcaggtccttgacctgtttgtacaaagtattacagttacaaaacagcaagccgggaacatttgccaggcagtgctgggctgagtgatatggaaagggaatacggtttctgctggtgttggcaccagctgcgtctttcctcagaaataaaggcacctccctgggttgtcagcttcttcaggaggctgtgatggtctccaggggaggctgagcaccagttgtaaatgacattttcttcgcctgggcagtgcagtggccaatctcggctcactgcaacctctgcctcccgggctcaagcgagtctcctgcctcagcctcctgagtagctgggactacaggcgctcgccaccacgcccagctaatttttgtattttttagtagagacagggtttcaccatattggtcaggctggtctcgaactcctgaccccgcgatccgcccgcctcggcctcccaaagtgctgggatgacaggcgtgagccaccgcacgtgggcagtatttttgtttgtaatgttctgctccttgtttgtaatggagctcctttccaggaggacgcccggcactcggaatcctgtcacaacccttctgcaccccacctgcagcccccagcacccacactctgcttgttgtgctccttgggctggggtggtgctgaggctaaggggaaggggaataacacaggaagctgctcatatagaaatcttggtattattgttcctgaggagaatgatctggaaaatgcccagctggttgtcaggcgggtaataggatatctttgtgcagtgattgaaactatagtttgggcagtttccccggctgtggaaataaggtcggattccgcatttcggtgggccctggagacgcgtgtgtctgtcagttggtggctgctgcccatttctggatcccttttgggagaagcccctgccgtggcacctaccccaggactgcactgtcctctgccaccttctgtggtttcttccccgtgtagagcggaactgaaggtattgtcggggcccccaggtatttttagatttagtaggagtttcattgctgaaaatatttttgcattggtcgactgggtggcagacacttttgtcccttggtcacccactcctcccagctcttgggccttctgggcccctgtggcagagtcctttgggtcagttggatggtggttttgtgtcctccacacttgaatctgggggcagttgtggccaactttccgtctcaaaggaactgctgatttttgtgcatatctcagattcgtgctgttcaagagcaagtattgtttgtttgtttttttttttttttgagactgtctcactctgttgcccaggctggagtgcagtagggcgatcttggctcactgaaactttcacctcccggattcaagcaattctcctgcctcagcctgccgtcaagtattggttctttctggctagaggctgagaagggctgtaactgcatggaacgcaggctcgcttagtcagtggtggcagcacagcttgctggagggcagatggccaggcgggggcacccctagtctgtgttcccttcttcacattctgtccctgagtccggggtgtgaataatccagcactggcagtggttcgcctcacaatcacaagctggccttcctgtccttttagagttctcaaaaaagaaaatagagatcgtaagtctgaaacaattgatttccatgaatgtgagcatgagttagttcctgtgttctcctcagggatatatgaagatattcctttttttttttttttttttttttttttttaaggaacaggttattgtcttgtcacccaggctggagtgcagtggcacagtcatagctcactgcagcctcaaactcctgggctcaagtgatcctcctgcctcagcctccggagtagctgggaccacaggcatgcaccaccatgcctggctaatttttaaatttgcaaagacaaggtcttggctggtcgcggtggctcacacctgtcatcccagcactttgggaggccgaggtgggcggatcacaaggtcaggagatcgagaccatcctggctaacaccatgaaacccgtctctactaaaaaatacaaaaaattagccgggtatggtggcgggcgtctgtagtcccagctactcaggaggctgagacaggagaacggcgtgaacctgggaggcggagcttgcagtgagccgagatcgcgccactgcactccagcctgggcgacagagcgagactccgtctcaaaaaaaaaagaaaaaaaaaaagacaaggtcttgctatgttgcccaggctggtctcaaactcctgccctcaagcagtcctcccatctcagtctcttaaagcgctgggattcccggcaagaaccaccatacctggccagaatattccttttcaaaggaacctagaaaggctgggaagcactgcagcttgcgcgtcctgtcgtggagggcctggcgcggctgcccgctgagttgtgctctgtgtctgcaggtccagccctgctgggagttttctgccacacagatttgcggaagaacctgaccgtggacgagggcaccatgaaggtagaggtgctgcctgccctgaccgacaactacatgtacctggtcattgatgatgagaccaaggaggctgccattgtggatccggtgcagccccagaaggtgcgcatggctgtgcctggctctccctgccctggtcacccagctcggagtcctcacccccgatgggtttcctaaccgcagtgtccttgcaactttgcctaagctaaatggaaattagtctccggccactctgttaacagggctccaagaagggtggaggcgagaggcagtgacacagaaagcgctgtgcagtacaatcctgggcacttgagtcttcttgggggctttctgcccctgcatgctgcctctgggggtggtgccctcagagctggaggggcttggagcggtcgtaggtggttgcaagagtgtcaggctgagcaggaaggagaaggtgctttcactggctctcctggagcagggcaagctggcagggtcaggacgggccatgtcagcggcccctcatggcgtgtcctgggttctgctgggcaccctaccatataggccagcaagccaggcctaggagtgtgacaggcctttgtccttccccggggccactgcaggtcgtggacgcggcgagaaagcacggggtgaaactgaccacagtgctcaccacccaccaccactggtaagtgccgcgtctcacctgggggtgtgggacctggctcacttctcgccccggtgggtttagggacatcaaggcctgtctccccccacggctctgtctgctttgtgaggacaagcccccagcagacttctgagaaagacccgggactcaccgtagcccccaaggggcaagtctggtgctcagtgactctgaggccccgagggtgaggggagaaggttacagccttaccctcaggccccaccccccggctctctcctgggccatgcgggtttgtgccctggcacgttggcctcaatgttggggaggaaatgagtctacaggtgagtggtttttaaaaaaaaaaaaaacaaaaaaacaaaaaaaaacaagcagccagccgggcacggtggctcatgcctataatcccagcactttgggaggctgaggtagttgggtcacttgaggtcaggaccagcctggccaacacggtgaaacccagtctctaccgaaaatacaaaaattaactgggcgtggtggtgggcgcctgtaatctcagctactcgggaggctgaagcaggagaatcacttgaacccgggaggcggaggttgccgtgagccaagatcgtggcattgcactccagcctgggtgacagagcgagactccgtctcaaaaaaaacaaagacaagcagccatatctggagaggttgggtttttaaaaatccttgaaaatggatgaataaaatgccctgtctgggttctagggctggcattgcctgctcaaggccgttgtttggcttttagaaatttttgaggctcttcaaagctagagagacttacttctttttgccaagcaagcgcccgagggcaaccggcacctttctcctgagccaggacccgtctggcactgccctagggcctctcagctgtggcttccccagcctctgtgttggggtgaaatgaagcctttggtcctctccttggtggtgggagcgctgtgctggtggcttggccaaggtttgatggaagcgtcatggttcacacgcagctggacttaggcctggagagtctcaggctctgtgagttgggcccctcgagcctcttcggggtcatcagaggtgtccgtgcagggacctgggcttgaggggcggtgcctgcagcctccctggcccttgtcctgtgtggctgagctgctgtctctcagcacgttggcctgcctgtcgtgcgaggcccttgctgccaccatgcctcctcctggggaccctggtggtggcctctgtgtggctgcctggcacatcacagcttgctgcagctccctgcctctcccggcctcgccgcagacgtctctttctaacactgtggtgctttttagttccccggcccctctaacattcatgccgacacgtgaagtcctaagccaggccatagcttcagcggggtggggtttgctcaccgatggtgggtggtgatgggcagaccaaggcctgtggtgccgcgccctcctgaagggtgggaggggcagagggcagcggccaccactccaccctgttatcttggggcccagtggtgccaaggcaggcggtttctggtgtggttgctggagtcttcatgggaggcacacgaaggagtctgtgatatcatgtgagacccgggaagggccccttcaaccgcccctttctgaactgcgggtcaggcaggctcccctggggaaacctgggcgcgtaggaggcacctccacctgctggagctggcccaggctggcctcccctgcagacaggccgcgtctagggccagctgctcatcccagacgcacccaggtgattcccatgctgaacagtttgatctcctgccagagtgtcgggccacaaactgggcagcacatcaggatcacctgggggccttcaaaaatcaaaaatccacccccaggccatgccctggacccactgcaccaggacaagaaatccaccccaggcctctccccagacccactgcaccaggacaagaaatccacccccaggccacgccccagacccactgccctaggatgtgggggtgggaaccaggtggtgctttgtaaagacgtgcaggtggtaaccccaggcccccacgctcggaaccctggccacaggatcatccaggtgtctgtgatttgcttcctcggtttcctttgtgagtggaaaataagtgttgcgtttgactagggtttaagagcagcaggcagcccctcagctcagcaggcagccccctcagctcagcaggcagccccctcagctcagcaggcagcccaggtctcctgtttgacttctagggaccatgctggcgggaatgagaaactggtcaagctggagtcgggactgaaggtgtacgggggtgacgaccgtatcggggccctgactcacaagatcactcacctgtccacactgcaggtaaggagtgagccctggaggtgctccagcgtggccctgtcaggagcgtgggggaggggggtccctccccgcattctctctgctcccttaccccagtgacccgggagtgctctcagtggtcctctgtggcagcgtggatggtcttctctgtctaggcacaaggagaggagtgtgcaaaacgcggctgtgtgcggggctgtgaagcagggctctgagaccctggggagcgggccatgtgggcagggtcttggtgccagagcacagcacacaggtgggagggccctgcgagggtgtcttcagcctttttgagggtgtgaacatttttgaagtaaagaattggggcagatggggacaggaaaacaaaaggccatgtgtgggaaggaaagccgtctttcctagccagacggcgagcgtggatttggcccagttttgaaggaggaaacaagccccttggttttttacacgctcttgttccagggtggccctgcacttggggcgcacccatggagtgagcgagtcccccagtcccgtggtggggagcacctgccccaccttcacgggcatttccctcagagctgaggaggcccagtagggcccaggcggcgcgccgtgaccccgggagatggctctccagggtgtctgggagcacacgcggtcgcctgctttgttgaaggtggggtctctgaacgtcaagtgcctggcgaccccgtgccacacttcaggacacatttgttacttcgtgagcaagcccggaggctcggagccccctgccgtgttcacaggtgcgtgttcgagtgtgggtgggggcgggggttcttcgtgaagaccctgtgtctcctgccaggcaggctcacggggcagcttcgtggccttctctgttgcaccggtgtgagggggcccaggggtgggtgctggggagcctcatggtggggctggccgattcctcccatgatgggtttggatcgtggtctggaaggaagttacgcttgcagcaagggctgtgctggcggagactgctggacagctggggtccgggcgggtcccacgggaaaggagtcagtttcttccagcagggcgaggggtggctcagccctggggctgtgttccttgatgccgtagtgtggactcagggacctgtgctagtctgggggccctgcctgcctcccagggtggttgcagacctgtggagccacctgtggaggtcatatggccgggggacggcctcactgtaggccgggcccttcatggctgcggccttctaaggcggtgcggaggctgctggtggtgggggctgcctcccgtgcttgttactgtggccttgtcccgactggcctcacagtgcggggtttcacccggtgactcgatgtgggccttgtacggctgggaggcctcctggtgggaggtggcagccccagccttgaacccaggtgggagtgacccagggccacactcggacccctgggtggagtcaaaccaggggtgcagggagaaggtgtggccagggagccccagaggagggcggagggcatggcgggagggacgggcgcctcgctgtgagggataaggtgccttcaggctgcagtgcgcagggctgggggatgagcctgggtggtgccggtgtgggagggatggagttggggacctcagatttaggattcttctcagggcagcgagcacggagtccctgggtctcacctgtgcctcctgggctgtgtgcctggcgcaaggacagccctgtggagcagaagccccaggccccaagttcgcctctgtctgcccttccctatctctggggactccatggcctcctgctggtcctcagactcgaggtctagggcccttcaggggaacaggctccccaccgtccattcccatctctcgtgcccagaaggactcctggccttggcctgtgcccagcaccgctgcatgcttctctgccccaggtggtgagaagtggggcggcctccactgtgctgggtgctgggcaccctcctctcaggggactgccctgtttctggggcagacggccacgtgaggtcagcgaggccaggacagccgcgaagcagcaagaggagggcaagcggggacagaggcctgggcagtgatggggtggggatgccgtcctgaggccgaggccggaaggagcctgggtgcgcctgaggtgcccagcggtgtgggccgcatcttccgccatgggtgagaggtggtcccgctcagctcagccagggtggtgagaccttggtcacagggtggcgctggctgctggggccaagggaagatgggagccaggcatgggcctgagaggggctgctgcgtgtttggggagagggctggatttgtgagggtctcagagccacagttggtgggattgggggcagtgagggaggagtgacttgggtttcgggtctgctcggccagttgggtggttggactgtcagctgagacttggaaggagatgtgggagccggaatgcaggggggctgagtctgggcagccgtggccggagggcagccagggttcggggcctgggccttgccggtgagtgtcaccctgctcctggccccctcctgagtcctagccaccagcctcaagtggcccccacctcgtggctgtccttgtttccaggtgacaccttgtttgtggctggctgcgggaagttctatgaagggactgcggatgagatgtgtaaagctctgctggaggtcttgggccggctccccccggacacagtaggcagcgcctccctgcgggccggggtgtggggggccttaaccagggcggggctgctctccctcctggcaccctctcaccggacaccccccgggggcatccaggtcccgtccctgaggactttcacaggtggtaacagccttccgagctcacctgtcacctctctcctcagagagtctactgtggccacgagtacaccatcaacaacctcaagtttgcacgccacgtggagcccggcaatgccgccatccgggagaagctggcctgggccaaggtgagtggggccgtcactgcgcagtgccttcctgtgggctgctcagggccgctgtgcacagcggggtcgccagagtgggtagacactcacactctgagcccagagagcaggcctgggattcaggccagtgtggcccagctcgccctgcacggcaaacccaggggttctatggagatccctctgcctcggagggtctggagtaggcctcagacgctgcgtgtgtaaaaagcgcccagcctgttcccacattctgagcagtagggtcaggctggcagcacgtggctctgctggctctccaggccacagaacgtggctctgtgtccaaaggactcttatctccacggtggccccacgtgagcctccatggcgtagcccaggccagctgggccaaagtctgccaggagcaggacggggttctccaggggtgtgtttccccgaattcactggaaacggtgtcacaagcacgcacgcctgggtggtctcaggcgtgggctccctctgctgagtggagtgagagtcgctgcctctgacagggttgttttaaataaatcacccggttttttgagcatctttttcaatttcttagagtagaggttaacattattttacagtatttactcatgcaaattccaactctaaatcagatgaatcataaatactcatcttttttttttttttaatttttttttgagacggagtctccctctgtcgcccaggctggagtacagtggcgtaatctcggctcactgcaaccagcacctcccgggttcaagaaattctccctgctggccgggcgtggtggctcacgcttgtaatcccaactactcaggaggctgaggcaggagaatcgcttgaacccaggaggcagaggttgcagtgagccaagatcgctccactgcgctccagcctggtgacagagcgagactccgtctcaaaaaaaaaaaaaaaaaaaaaaaaaaattctccctgcctcagcctcttgagtagctgggattacaggcgccagccaacacgcccagctaatttttctacttttagtagagatagggttttgccatgttggccaggctcgtcttgaactcctgacttcaggtaatccgcctgccttggcctcccaaagtgctgagattacaggcgtgagccacgtcacctggcccgtgtgtctgtcttgagtggacagattgcagtttgaggaatgttgatgatgtttgcacttgtgtaatcccctccacagtccagatgtggaacttaccactaccccaaaggctcctgtgtccctcccatgtggcgtccccgccagctgttgctctgctgtgacctcaggtcactttctagtttcccatgaacagaatctcattgctccgtcatctctgtggcattctcggccccgctgatgttggtgagggtcagccacgctctttgcttctgagtagcccattgtgtggaaatgctacaatttgtttatgcatttgtctgtttccagttttttgctatttgaataaagctgctatggacatttgtgtacaagtcttttgtgaacatgtttttattgctcttggatactacctaagagtggaattgctgtgttgtgtggttaaaggtgtgaaccgttttccaaaaatggttgtactgttctacagtcccccaccaatgcttgagttccggggcctccatgctgtgccagcactgcttggtgttgtcggtctctccaatttttgccattctaacttgcctgtggtggcgtctcactgcctttaaaatgtggatttccccatgtgaccatcttttcatgtgtgtcggcctttggatgccttctcatgaagtttatgttcaatcttttgtccattttaaatattgggtttggcctgttgggctgctcttgtaagagttccttatatcatctggaaacaagtctttgtgagatatatatatatatgtgtgtgtgtgtgtgtgtgtgtgtgtatatacatatatatatttatttgtttgttttttgagacaaagtcttgctctgtcgcccaggctggagtgcagtggtgtgatctcatctcactgcaagctctgcctcccgggttcaagccattctcctgcctcagcctcccaagtagctgggactacaggtgcccgtcaccacgcccagctaattttttgtatttttagtagagatgggtttcaccgtgttatccaggaaggtctcgatctcctgacctcgtgatccacccgcctcggcctcccaaagtgctgggattacaggcgtgacccaccacgcccagctgagatatatatttaaaagatgtttttctctcccagctcatggcttgccttttcattttcttaacattgtcttttggaaaatagtttatagttttggtgaagttccatttacttattttttgtttgtttcttttttttttttttgagacggagtttcactcttgttgcccaggctggagtgcagcggcgcgatctcagctcaccgcaacatccacctcctgggtttaagcgattctcctgcctcagcctcccgagtagctgggattacaggcatgcaccaccacacccggttaattttgtatttttagtagagatggggtttctccatgttgatcaggctggactcgaactcctgacctcaggtgatctgcccaccttgggctccaaaagtgctgggattacagatgtgagccactgcgcccggcctactcaatttttcttttatgtttcttgtgccctttctaagatatctttgcatacccttagctcacaaagactttctcctgtgtttcttcctagaagttttaaagtcttagcttttatatttacaaacaatttacagtgttccctttcaagatggtgtttgtgtgtggtgcgaggtgagggtagaggttcaccctctcgcagtgtgatcccgaggtgttcagggctgtctgtcgaaggactgtcctttcctccctggattgccttggcacctttctgaaaagaatgggccctctatgcccgagtctgcttctggtctctgctctgtttcgttggtctctatgacttgccacggtgtccgaggacagcaccttgatgactgtaactctgtgctgagtcttggcactggtatgtgtgaatcctccagtgttctttttcaaaatggttttagttgttttaagccttttacatttccgttttcagaatcatctcgtgaacttctatcagaaaagctagcctggctgctgattgggactgttgtgataactgatgtggcgagaattgcgatcttaacattgagtgtttctgtgagctttccatctatgaatgtctttagcttttctcagcagtgttttgaaatttgcgtgttcaaggtcttgcacgtgttactaaatggatccctaagcacttctggtcatgattatttgttgatactagttataaatacagtggatgcgtattaacttcctgggtgtcttagtctgtgtggtgttgctataaaggaatacttgaggccgggtgacttataaaaggaggtttatgtggctcatggttatgcaggctatataagcagcatggcctgggcgtctgcacctggtgaggcctcaggctgcttctgctcatggcagaaggcgaaaggagctggtgggtgtgaagcatgtggccagaggaaggagagagtgggggaggcaaaagtttcttttaaacaaccagatcctgtgggaactaacagcaaaaactcgcacttggagcagggcaccaagccgttcacaaaggattccccccatgatccaaacacctccattaattggggatcagatttgagcatgcgtttggagggatggacatcccagccgcagccccgtgtgaacacccaggagaagggagtggccgggctggacgggaggtgtgtttgacttttaaagaaactgccaaactccccttccccggtgcttgtggtgtttgctttcctgctgggaaggcgtgggcacaccagctggtccgtgtctttcggcacaccacacggtggagccagcccacgcggtggagccagccgtttgaaaggaggtgctggagcccagtccctggtgagaggccgcctcctgcagggcgcctcccattctgcggcctctggttttcttagcagtatcttttgagccaacatttttaattttaatgaagtccaatagattcttttatgcttcattcttttttgtctcccatctaagaaatctttgtttatcccaaggtcaaaaaattttctcctgtattttatttttggaatttgtatagttttaaaacttagtatgaactcccaccccccaaatgtctgctggatctgtaatgatattcctgctttcattcctgattttgacaatttgtgtgttttttttttgtttttttttttttttgagacagcgtttcgctcttgccgcccaggctggagtgcaatggcgcgatctcggctcaccgcaacccctgcctcccgggttcaagcgattctcatgcctcagcctcccaagtagctgggactacaggcatgtgccaccatgcctgggtaatttttatatttttagtagagatggggttttaccatgttggccaggctgatctcaaactcctgacttcgtgatctgcccgcctcagcctcccaaagtgctgggattacaggcgtgagccactgtgcctggcctgtcattctttttttttttttttttggttggggagagacagcgtcttgctctgctgcccaggctggagtgcagtggcacaatctcggctcactgcaacctccgcctcctgggttcaggcgattctgctgcctcagtctcccgtacctgggactacaggcctgtgccatcatgcttggttaatttttgtatttttggtagagagggggtttacacgatgttgcctaggctggtcttgaacttctgggctcaagtgatcctcctgccttggcctcccaaagtgctgggattacaggcatgtgccaaccacacccggcctcattctttttgataggtgtaaaatatactattgcgtgggtgtcacccataaatcattttaccaatccccataggagggacgttgagagttttcaactccttttgcaccctggagtccagaacccacacgaggtggagctcttctgagctgtgctgcaaggactgaccttatttttttatttttatttttttgaggcagagtctcactctgtcacccaagctggagtgcagtggtgcgatctcggctcactactgcagcctccgcctcccgggttcaagcgattctcctgcctcagcctcccaagtagctggaattacagacatgtgccaccacgtctggctaatttttgtatttttagtagagacggggtttcaccatgttggccaggccggtctcaaactcctgacctcaggtgatccacctgcctcagcctcccccagtgctgggattacaggtgtgagcaaccgcgcccggcctgttgttctttctttgggagacagtgtcttgctctgctgcccaggctggagtgcagtggcatggtcttggctcgctgcagcctccacctcctgggttcaagtgattctcctgcctcagcttctccagtagctgggattacaggcacccgccaccacacccggctgattttttctattttagtagagatggggtttcaccgtgttgcccaggctggtctcgaactcctgagttcaggcaatccacccacctcggcctcccaaagtgttaggattacaggcgtgagccactgcgctcggctgactgaccttatttttgtctttaaatgcttcgtactttgtaggaaaaatagctagaacattaaaactcgttttaataggtaacctaaaagcttatgacaatttgtacttcctctgttttaaaggtctccttagaagtgttaactttgcttccctcgtaggaggcagagggagatttcttaggattgagaatgttggtgggaacacagggaatattttaaaacattctcagattcttttcgccagaagggaagaacagattagtgagaaaccatcttggcatctaccagacccccgcttggtgcagctctaccagctgaagagtcactcaccgacaccactgcccatagcgggtggggaacctcgggggtgaggcgcggtggtcttgagcctgtgcgtgggcaccagcagcttctgtcagagctctgccctgaggccctcctggtgcggctgcggtagaagggccggggctgtgtggagaccccgctgttgccgccctgtgttttcctgctaactgttggccccgtggctgggtttgcattctcctccccccgcccccaccccatctgccctggtcagtgctggtcggaagggagaccatctccatctcgagaggaggtgaccagctgcctgcctgcaggggcttgggtggcctcccctgctgctggtccctgtgcccctcctccccgtgcttgctgtgaggctgcagctgtggcggtttcttttctgtgtctcctgcattgctgttacctccataatgtgaaatgtaaaccatgtgaatgaaaaggaagctccgtccctgtcgtcctctccaggccggtgcgggaaggcggatgtgtggctcatcccggacgctggcttctcttccctcttccacacgcgcacacccgccgggctctgctcaccttgccttctcagccttgtcagtcgggcagtgtcctaaggttaccaggaggtgttctgaagcattttttgagacgtgatgtcgctgtcacccaggctggagggcagtagcacagtcttggctcactgtagcctcgacctgtgctcaagcgatcctcccacctcagccccctgagtagctgggaccacaggtgcctgccaccatgcctggctagttttttgtatttttagtagacacagggtctcgccatgttgtccaggctggtctcaaactccagggctcaagtgatccatctgccttagcctcccaaagtgctggtatcacagacgtgagcctccgtgcctggtctgccatcctgtgaagttcccgtgataaagtggtgcgtttctcttgcaggagaagtacagcatcggggagcccacagtgccatccaccctggcagaggagtttacctacaaccccttcatgagagtgaggtgaggcccagggcaggtggtgggcgcgggcccctcccctctggcagtcccactgctgcacacacagccggtacgtccgagaccccagatggctgaggctgccttggggagctgtcacaggtgcagccgcagagcccgagcactcttcttgaggggggtccggcctttcctggcaccttggccggggtgtgagtccttctggaccctggagttcagaacctgtcagaaggggagtggctgccgcctccccgccctccgtgtcctctgagggctgggctcggccagcacgagtcgccttcctctgcagtggccctggctcctccggtgggcgtggctcggcacagcctgcagcccggtgctggcctccgcagggagaagacggtgcagcagcacgcaggtgagacggacccggtgaccaccatgcgggccgtgcgcagggagaaggaccagttcaagatgccccgggactgaggccgccctgcaccttcagcggatttggggattaggctcttttaggtaactggctttcctgctggtccgtgcgggaaattcagtcttgatttaaccttaattttacagcccttggcttgtgttatcggacattctaatgcatatttataagagaagtttaacaagtatttattcccataacttccccttgcagactgttttcttctggcctttaggcctctgcttgtcccctcgggcctccttcctcctccgtgagccactgcagtccccccacccacgcttcaggtcaggcgtgagccggtgcctttgctgtggccttggctgggtgctgatgggactgtcaggcccactgctgcggtcggtacctttgcagcctgtgcttgtggtctgatctgctcaggcccccggcagggagaggtggccgcgtcttcttcctggaggcggccagatcgcgcgacctccaggcagtgctcctactcggcagcacccacctgcctctgcttgagaaagcacaaaccgccctctggggaagcagccagctggggagtgctctcggcctgtgaccccgggagggctgggtaggtggccacatgtcctgccccggctctgggtgtggctggtggcagagggtctatgagggaagggcaggacaaaggcaacccctaaggctaatctgaaatttagggctgggcgtggtggctaagcctgtgatcccagcactttgggaggccgaggcgggtggatcacgaggtcaggagatcgagtccatcctggctaacatggtgaaaccccgtctctactaaaaatacaaaaaattagccaggtgtggtggcagacacctgtagtcccggctactcgggaggctaaggcaggagaatggtgtgaacccaggaggcggggcttgcagtgagccgagatagcgccactgcactccagcctgggagacagagcaagactctgtctcaaaaaaaaaaaaatatgaaatttaataataatctttttaaaaagttacctgggcagggtggtgtgcagctgtagtcctagctactcaggaggctgaggcaggaggatcgcttgagcccgggagtccaaggctgcagtgagcattgcttgtgccactgcattctggcttggggaacagggagaccctgtctcaaagaaattaattaatcatgcagttgagtggtatttagtccattcacaatgctgcagccgcctctcgcgtgttctgaaacatttgacctattcactgactgactgactgctctgtcagtgagctgtgaggggaggtgactctgtgtggggcccacaccctctgccacctggtcctatagacagactcttctgagtggaggggcagagcggccctgggacctaggagcaagcctggcccgaggcttgtggattgaagaggaaggctggcactgcacttcagaccacatgcatgccctccccccggaggggtcactggtctgttcgcatactcgcagacccctctgggatgccacggaagccaggcgtgtgtgaggaggcagggcagactgcttctccggctttcttctcccactacccccgccccagcgcaaagagtttgttctattgttcagcaaatattcttaggccagaatcttaaatgtttccattctataacaaacactgtgctcatttgtcaaccaataagtaattttaacagccctctttggatgcaacaaatgcctgaacatctgatcttttattttcttgagacaggatctcgctctgttgcccaggctggggtgccgtggtgcaatctcggctcactgcagcctctgcctcctgggctcaagtgattctcttgcctcagccgcctgagtagctgggattacaggtgtgcaccaccatgcccggctacatttttgtatttttagtagagatggggtttcgccacgttggccaggctggtcttgaactcctgacctcaggtgatccacccacctctgcctcccaaagtgctgggattacaggtggaaggcactgcacctggccttgatgtctgatctgaatggtaggggtggtggggcaggcagtagttgtgggagttgacagtgcttagagggaaatttatagctttaaccacctatgtaataaaagggggtctcaaataaaaaatgttgggcagggtacggtggctcatgcctgtaatcccagcactttgagaggctgaggcaggcggatcatgaggtcaggagatcgataccatcctggctaacatggtgaaaccctgtctctattaaaaatacaaaaaattagccaggcgtaaacttgggaggtggagcttgcagtaaaccgagatcatgccactgcactccagcctgggcaacgaacaagactgttgtctcaaaaaaaaaaatgtcttcaaccaggtgcagtggctcatacctgtaatcgcagcactttgggaggccgagctggacaaatcacatgaggtcaggagtttgagaccagcctggtcaacatggagaaacctgatctctactaaaaatacaaaaattagctgggcgtggtggcatgtgcctgtagtcccagctactctggaagctgaggcacgagaatcgcttgaacatgggaagcagaggttgcagtgagccaagatcatgccattgcactccagcctgagtgacagagtgagactttgtctcaaaaaagaaaaaaagtacaattctaccttaaattagaaagaagaacaaatgaaacctaaagaaagattagagaggaaattagtaaactagaaagcagaaaaaccaaaagttggttccttgaaaagatcaacaaaattggcaaactcttagctagactgactaccaaaagcatgaaagaggggacatcactaccaatcctacagaaatgaacaggacttggccgggcagagtggctcacgcctgtaatcccagcactttggaaggctgaggcaggtggatcacgagatcaggagatccagactcatcctggctaacatggtgaaaccccgtctctactaaaactacaaaaaattagccgggcatggtggtgggcgcctgtagtcccagctactagagaggctgaggcaggagaatggcatgaacctgggaggtggagcttgcagtgagctgagatcgcaccactgcactccagccggggcaaaagagcaagactccgtctcaaaaaaagaaaaaaaagaaagaaaaagaaatgaacaggacttggaatactaggaaaactctgtaccaacaaattaggtgaaactgacaaactcctagagggacacaaatcacttaaattggctcagaaatctgagaaatttaatagaaaatctaaatagacctataacaagaaattatagtaatgaaaagtcctgagtcttcctacagaaagcctgtgcccacgtggctgccactgtatactgtcaataacaccaaccattcacaatcttcagaatgtggaggatgagacacgcccatctgagtctaagaggctaaaggcagcgaaaggcatcatgatccgcgcccccaccccacagaacaatgtccatcatgaatacagacataaagatccttaacaaaatattagcaacccaaactcggcaacatcatacaccacgaccacgtgggtgtatcacagcaaagtgaggttgcttaaacatctacgaagcacttaacgtcataagccacattaatagaaaaacagatgcctgtaatcccaacactttgggaggctgaggtgggcggattgcttgagcccaggagttcaagactagcctgggcaatatagcgaaaccctgtctctaccaaaataaacaaacaaaaaaaacaaaaattagccaggcatggatgggagggcatgcttatggtcttagctactcacaaggctgaaaccagaggatcatttgcgcccaggaggtgcaagtccagtgagctgagatcgtgccactgcactctagcctgggaaacagccagagcctgtttccaaaaaaaaaaaaaaaaaaaaaggcacccacaagatacatctcaatcaatgcagaaaagcacagcacaaaagtcccacacctgttcctgataaagactctcacaacccaggaacagaaggggaagtccccagctggaaaaggccatctgtgttaggttccaattgctgctgggataggtcaccgccacctcagtgatttaaaacaacacaagtttaggccaggtatggctcacacctgtcatcccaacactttgggatgctgaggcggctgaatcacttgaggtcaggagttcacgacaagcctggccaacatggcgaaaccccatctctactaaaaatacaaaaattatccaggtgtggtggcacatgcctgtaatcccagctacttgggaggctgagaccagagaagtgcctgaacccaggaggtggaggttgcagtgacccaagatcgtgccactgcacttccagcctgggtgacagagcaatactccatctcaaaaaaaaaaacaaacccaaaaaccaaaacccaagtgtaccttgcggtttggaggtcggtagtttgacatgggtctcatgggactaaaaggaaggtgtgggcagggttgcgttccctgcagaggccctgggggaggctctgtatccccatcctttccacaggcacccttggctcgtggcccttcctgccatcttcaaagccagcaacagcaggtcgagtcctccgtgcctcaaggcaactcctcctctgcttttaaggaccgcgcagctccctaggttcatctggaaaagccatgctactccattttggggaactgacctgaaattggcaccgcctcttgttggtgtggcctcacatcatcccagggcccaggggttagaatgtggccatctttgcggtgagcactattctgcctcccatagcatccgtgagaaacacagctggcagcgtaattcatggtgggtgacgatggttccctctaaaggcaggaacaaggggtttaataagatgctaaatatatatatatatatatatatatatatatatatatatatatatagaggaaaggaaaaggtaaaagtgtctgttcatagcacgaggatcctctacatagcaaggcctacgggacacacacaaccggaacaaggaagttcagctgggccccgggacccagagttaacagattcattgcctttctatagactacgaacaatccaaacaaaactaagacgccattcactagcatggaaacgagaacacacacttaggggccaccttggtgaaggaaactgaagatttatacactgaaaatacgagacattgctgagagaaatggaaagacagcccatgttcattgggtaggagactcctattaagatttctgtctccccagatgggcccatagatcccatgaagtccctattaagatcccatcaggggccagacacagtggctcacacctgtaatcccagcactttgggaggcagaggagggcgaatcacaaggtcaggagatagatagagatcatcctggctaacacggtgaaaccgcagctctactaaaaatcaaaaaaaaaaaaaaaaaaaaattagctgggtgtggtggcaggcgcctgtaatcccagctactccagaggctgaggcaggagaacagcgtgaacctgggaggcagagcttgcagcgaaccaagattgcgccactgcattccagcctgggcaacagagcgagactctgtctcaaaaaaaaaaaaaaaaaaaaaaaaaaaatcccaccaggtattttggagaaagtgacaagcagacaagcagattctaaatttatatggaaatacaagaatctagacaagccacaacaggtttgaaacaggatgagttggagggctcaggctgcctgatttcaaaactcactataaagtgtgagtggcaggccaggcatggtggctcacacctgtaatcccagcactttgggaggccgaggcagggagatcacaaggtcaggagttcaaaaccagcctgggcaatatgctgaaatcccgtctctactaaaagtacaaaaattagccaggtgtggtggcgggtgtctgtagtcccagctactcaggaggctgaagcagaagaactgcttgaacccaaaaggcgaaggttgcagtgagctgagatcatgccactgcacttcagcctgggtgacagagtgagactctgtctcaaaaaaaaaaaaaaaaaagtgtgggccgggcacagtggctcacactctgcaatcccagtactttgggaggccaaggtgggtggatcacctcaggtcaggagtttgagaccagcctggccaacatgctgaaatcctgtctctactaaaaatacaaaatttagccgggtgtggtggtgcatgcctgtaatcccagctaatcgggaggctgaggcaggagaatcgcttgaaccaggaggtggaggttgcagtgagctgagattgtgccactgcgctccagcctgggccacaagagcaagactccatctcaaaaataaagtgtgacagtggtacaaggaagggcatggagaccagcaggtcggagtctagaataaatccttgtattcgaggccatctgatttttcaacaaagatgccaagacatttcagttgggaaaaggagagtctaacacatggtgttgggacaattaggtatctgtggaagaagtgactcgagacccttcctcatatcctcataaactaactcaaaacggatcacagacctaaatgcaatagctgaagccatcagactttcagaagcagctgcaggagaacatctctgtcatcttgggttaggcaaagagttgttataggaaagaaaaaatcagttggaacttgtcacagtgaaaaacttttgtactttaaaaagacaactttttttttttctttttgagatgaggctttgccccgttacccaggctggagtgtagtggcatgatcgtggctcactgcagcctcaagcaatcctccagatccagcctaagcctcccgagtagctgggaccacaggtgcataccaccatgtgtggctaatttttgtattttttgtagagatggggtcttgctatgttgcctaggccagtcttgaaatcttgggcttaagcaaccctccagcctcagcctcccaaagtgctgggattatagatgtgagccaccacactgggccaaaagacagctttttttaaaaaaatagagaagctacaggctgggaaaaatatttgccagtcttttttttttcccgcttgttgatccatcactaagagttataagtaatatacaaagtcttacaactcaagaacatacccaattaaaaatgggtaaccagcagctttgtacatgttaaaaaaataaaaacaaaaagattgacttagattatgtcaccaaagactgacataagaatggccaataaacacatgaagaggtttgacatcactagttaacagaaaaacatgagttagaatagtttacaggaacataccaaatgctggtgagaatgtgggacaactgcaacttgcatactttgtaaaacagtacactcgactgggcgtgggggctcacacctgtaatcccagcactctgggaggccaaggtgggcagatcacctgaggtcaggagttcgagagcagcctggccaacgtggtgaaactccatctccactaaaaataaaacaattagctgggcatgatggtgggtgcctgtaatcccagctactcaggaggctgaggcaagagaatcgcttgaacccaggaggtggaggttgcagtgagccgagattgtgccactgcactccagcctgggcgataagagtgagattctgtctaaaaaaatatgggggccgggtgtggtggctcacgcctgtaatcccagcactttgggaggccgaggcagatggatcacgaggtcaggagatcgagaccatcctggctaacacggtgaaaccccatctctactaaaaatacaaaaaattagccaggcgtggtggtgggtgcctgtagtcccagctactcaggaggctgagggtggagaatggcatgaacccaggaggcagagcttgcagtgagccaagatcacgccactgcacttcagcctgggggacagagcaagactctgtctcaaaaaaaaaaaaaattatgcccacactagaaaacagttttttaaaggagatacaacactatgaaccagcaactccactcctaagactgtacccaagaaaaatgaaacctgtgtccaaagacttgcacacaaatagagtagcatttttcacagtaaccccaaatggaaacagtccaagcctccagcaactaaggaggcgccatgaacaaatgtggccacagagcggagcatcgttcagctgcaaagcacgaagcattactccgtgtcacggcatggatgagcctccaaaacaccgcatccagggaagaaaccagatgcagagtgtacagctcatgtgggaaaggcggagggcagtgctggctgcacaacacgcatttcctgtcaccgacttgcacacttaacagtgagagaattttatgctctataaattataaatcaataaaactgttttagaaacagaatcatagagtaaagggaacacattacttcatacttagttatctcagcctgtctagaaaacaattccaaccctgacagacagcaaatgaaattgaggagagaaaatgataatgcataatagtataaaagcaacaatcatatataaaaagaaccgaaaaaaatacatgcaagagcacaacatagaaaatctacaaaaacacaagagacgcaagtcctaggtaaaggaggaaatactgcatgtccccaggtgggaaggctcagtacaggaagacgtcacagactgcagggctactcagaatttggttttgttttagagactcaacagctgcttccaaggtttatatggaaacgcaaaggactgggaagagccaagatgctcttaaacaatgaggccctactctaccagatgtgagaatttcctgaaaataacagggagaccccatctctacaaaaaaataaaaattagctgagcatggtggcacacagcacacctgtgagtcccagctacttgggaggctgaggcgggaggatcacctgagcctgggaggttgaggctgcagtgagccaagatggcgccactgcactccagcctgggaaacagagcaagacagtgtctccaaaaagaaagaaagaaagaaaaaaaactccagcttaccaaaaagccaccactgtgcagagagcatggcagtggacagacaaagggggccaagaatccagaaaggggcccaggcttagatgggcttggtttatgatgggcagtgacaccccttccaccaaacggcacagaggctgatggtaaccaccacacgggaacagttaaccctgagcctggcctctccctcttaagaggccgattagaagggaaaacaggacagtgttggcacaaaatagtacttgaaaccgtaaaaataaaatagaggacattaagaattttgccgttttcccatctgcattagtccattctcacattgctataaaggactgcctgagagtgggtaatttataaagaaaagaggtttaattgacttgcagttccacaaggctggcgaggcctcaggaaacttacaatcatggtgggtaaggacgcaaacatgtgcttcttcacatggcagcaggagagagaaattagtgcccagtgaagggggaagccccttataaaaccatcagatctcatgagaactcactttcaagagaacaggatggcaggaaccacgcccatgattcggccattccactgggtcccgtgcacaacatgtggggattatgggaactacaattcaagataagatttgggtggggacacagcccaaccatatcattccacctctggcccctcctaaaccgcatgtcctcacaattcaaaacacaatcatgcccttccagccatcccccaaagtcttaactcattccagcattaacccaaaagtccaagtccagagtctcatctgagacaaagcaagtcccttctgcctataagcctgtaaaatcaaaagccaagtgagttacttcctagatacagtgggggtacaggcattgggtaaatacacctattccaaatgggagaaattggccaaaacaaaggggctacaggccccaggcaaatctgaaatccaacagggcagtcaaatcttaaagctccaaaatgatctcctttgactccatgtctcacatccagatcacactgatgcaagagctgggttcccaaggccttgggcagctccacccctgtggctatgcagggtacagcccccctcccagctgctttcacaggcttgtgacaagtgtctgtggcttttccaggtccatggtgcaagctgttgtcggtggatctaccattctggggtctggaggatggtggcccttttctcacagctccactaggcagtgccctagtagggaccctgtggagggatccaaccccacatttcccttccgtattgccctagcagaggttctctgtgaagactctacccctgcagcacacttctgcctggacatccagtagttcctatacatcctctgaaatccaggcagaggttcctaaacctgaatttttaatttattaatttatttatgtttgagatggcgtcttgctctgtcacccaggctggagtgcagtggcatgatcttggctcactgcaacttctgcctcccaggttcaagtgattctcccacctcagcctcccaggtagctgggactagaggcgtgcaccaccatgcttggctaatttttgtatttttagtagggacacggtttcaccatgttggccaggctggtctcaaactcctgacctcaggtgatccacttgcctcggcctcccaaagtgttgggattacaggcgtgagccattgcacctagctcccaaacctcaattcttgacttctgggcatctgcaggcccaataccacatggaaactgccaaggcttggggcttgcaccctctgaagcaacagtctgagctgtaccttggctcctttagccatggctgggaggcagggcacccgagactacacaaagcagcaaggccctgggtctggtccactaaaccattttttcctcctaggcctcggggcctgtgatgggaggggctgccctgaagacgtctgacatgccctggagacattttccccactgtcttggtgattaacatttggctccttgttatgcaaatttctgcagccagcttaaatttctcctcagaaaatgggcttttctgttttatggcatcatcacgctgcaaatttttcagtcttttatggttggcttcccttttaaacataagttccaattccaaaccatatctttgtgaatacataaaactgaatgcttttaacagcatccaggtcacattttgaacagtttgctgcttagaaatttctttcactggctgggcgcagtggctcatgcctgtaatcccagcactttgggaggccaaggcgggcagatcacaaggtcaggagatcaagacgctcctggccaacatggtgagaccctgtctctactaaaaatacaaaaattagctgggtgtgacagcgtgcttctgtagttccagctactcaggaagctgagacaggagaatcgcttgaacatgggaggcagtggttgcagtgagccgagattgcgccactgcactccagcctgggtgacaaagtgagactccatctcagaaaaaaaaaaaaaaatttatttcactagatgccctaaatcatctctcacaagttcaaagttccacaaatctctagagcaggggcaacatgccaccagtctctgctaaaacatagcaagagtcacctttattccagtttcctacaagttcctcttctccgagaccacctcagcctggactttgttggccatatcactatcaggattttggtcaaaggcattcagcaagtctaggaagcgccagactttcccacatcttcctgtccttttctgagccctccaaacggttccaacctctgcctgctacccagttccaaagtcacttccacatttttgggtatctttacagcagtgtcccactgtaataataattattacagtaataatttactgtattagtcttttctcatgctgctgataaagacatacctgagactgggtaatttataaaggaaagaggtttaatggactcacagttccacatggctggggaggcctcacaatcatggcggaaggcagagggtcttacacggcggcaggcaagagagcgtctgcaggggaactcccatttataaaaccatcaggtctcagccaggcgcagtggctcacgcctgtaatcccagcactttgggaggctgaggcgggtggatcacgaggtcaggagatcgagaccatcgtggttaacacggtgaaaccccatctctactgaaaatacaaaaaattagccgggcgtagtggtgggcacctgtagtcccagctatttgggaggctgaggcaggagaatggcatgaacctggaaggtggagcttgccgtgagccgagattgtgccactgcactccagcctgggagacagagcaagactccatctcaaacaaacacacaaaaaacaaaaacaaccatcaggtctcatgagagttactaccacaacagtatggggaaaactgccccctgattgagttgtttccacctgtccctgcccttgacacatgggaattattacagttcaaggtgagatttgggtggggatgtgaggccaaaccaaatcatctttgttgttggtatctgaggaatcaacctcaacatttaagggatatcatctcaattaaaattaagaactctcgccggcccggtggctcacgcttgtaatcccagagctttgggaggccaaggcaggcaaatcacctgaggtcaggagtttgagaccagcctgactaacatggagaaaccctgtctctactaaaaatacaaaattaggggctgggcacggtggctcacacctgtaatcccagcactttgggaggccgaggccggcaaatcacccgaggtcgggagtttgagaccagcttggccaacatggtgaaaccctgtctctactaaaaatacaaaacattagccaggcgtggtggctcatgcctgtaatcccagctacttgggaggctgaggcagaagactcgcttgaacatgggaggtggaggttgcagtgagcggagatcacaccactggactccagccctggtaacagactgagactccatctcaaaaaataaataaataaaataaaataaaaattagccaggtgtggtggttcatgcctataatcccagctacttgggaggctgaggcaggagaactgcttgaacccaggaggcagaggttgcagtgagctgagatcgcaccattacactccagcctgggcaacgagcaaaactccatctcaaaaaaaaaaaaaaaaaaaaaactcaccagaatcctaacgagaggacagaaaggccacacacctgagtgtgcgtgctgaatgcttttgttttttcttgtatcttgcaaatcagaaatcagccagctaactagaaaatcggcaagagaccgaaaccagcagtggctgaggccagatgaccctgtggctgtgtgctggacaagatgctcggtctcccaggtgatggccaccgtccactcgccactggcctgagtgtagacaggtatgcacccacaggatgcagagccacagggctcggtggcattgctggaaacagtgagaaggacagggacagatgtattccaggacgtgacctagacatggcctcacctccctcgggtcctgtcctacagaaagccaggccctgtgcggcctgaagacaggcagaatgcggctcatggaggagcctgggaggccaccggccttgagctgggagaggccacggggagtggggccattgggggtggcggcagtgatgggggcctctggaactcaatgggctgaatgtgtgtgtaggcctctgcgttaccacaggaatcaaagaggcctggagcccccttacgcggctgccgcaaccctggtgaggctctgcccgcccgcgacacccggcccctcccaaaggaagagaacagggacagattctcccttcccacctggaatgtgtggggctcccaggtggggtgcgcggcctgacggaggccggggcccccacggggacctctcctgagaggaggccgcccgggtctgctggcctcaggccccaggcccctgctgagtctgcgttttctgctgagtaaacggatcgtgggtctttctgggtgtggactttctccccgtggatctataatttctcagaagaggagccgagacgccacctggaaaatgatcaattctcgataaagggaagacgatgacagtgggccggcggcttcccacagctctgcacggggcctgccaggtgaggccggagctgaggatggggtagggccctggaaaactgtggtctccccgagccctggctgtgcccccgcctgcaccccttccggctgcttccctgcacactttcccactgccgagggactggtgggcaggccccactgacagccaggggaggggcctgcagggacctggaggggaggggctgcacctgctcaggccctgggggagagagcgactggttgggaagtggtttgagcaggtggaggggaaccaggggcctctggaggcaggtggagacggagcccaggggtggccttggacatggctgggcacacattcctgtggcctctctgcacacaagcggtgactgtggggcggccaggccctcaccagagccttgggggacagcaaggggcaggtgaggcttgtctgaggcacaagacctggctcccatggccaggccacccccacacactccccgaggatggcgcagggcaaaagcaaacaggcgcctgcagccctgccaggcattcctagaagaggctgggggcggggcagtggccagacaccagcgcccctggggtcacgggagaggcagggtgagcttgggccctggacagcaccgtgggcctgaagcccaaacggcagctcccacccaggctgtagggaacccccgggagggcgggtggatggctgggtggggcacggggaaggggcggcagccccttagccccacacggctggctactcaggccaggggtgggctcaagaccccaggagctgcccgaggagccccctgcccgcaacaggacctggtaaaaccctgggctccccaaaccggcctcaagccccagcccctcccaggctgctgcaaggggtccccaccccaacctggctgcccagccctccccagtcagccctgcagggggcccgggcactggccgtcagcccccagggccgcattacggctacctcgggccccgactgaagctccctcaccccctgcactgtctgcaccccagggctccgggctgatgccggccgcccggcacgagggggttaacagagccagggccagctgggttgggccagccaggtgacaggcgcgggctgccccgcagtggggaaatccagagggcaggggtggccggcacagcagacgtaccctccctcgctgcctgcctgcagcctgccctgcatgcaggatggccctgaggaaaggtgaggcccccgagtgccccgccacccactctaggggtggccagtctgtgaccctgagcccgctggggagaggccggggtagcccccaaggaagctctggggggctcagctctgggggtctgcgggggactctggggagcccacagtcggaaatgcggctgctggggttggcagggggacacagctgtgcctggcaccaggggtctctgtcccgtcctccaccctaagggcgctggcggcggcacaggggaggagggccaggtgcaggccggacccttcagctcccagcacagcggcgggaagtgccccgcacggcccgcgttgtgggcccggcccaggcaggagacgttggctcacaccccattgtctctgtggggtgaccccttgcagcttcggccacccccaagcctgagctgagctccagagctggctcaggccactcccaacccatcgtgacagaagggcagtcgggggggccccacctcgcccctgccaccatcccagcaattccacactctctgaggatgggggggccatacagtagaggttttgggtcatcgctgcttgggagcctgctggctgggtctgtggggcctgtggccccttgtcctgaaaggcaatgtgagctttggtggccgacggtccagggttcctacctgtcccccgacggcggtgccccggtcccctcccgcagcacccgaccaaggcctggatgcaggcaggtgagaccccgctggggggcctaactggggcaggaggtgcccagctccctgtccagcctctgagggcagtgagcgagtgcccaccaagacctgctgcagaatattctgaaaatggccggaccttggccaatggctcagttccctccccttcctctaggccaacgtggcagactggcctggctcaagcgcctgccttgggggtgcggctgccacatggccagacagcccgagacccagcctggccgagcccacgtggcctgcgcacagctggagagccaagccctgagcgtctgtgcagcggggcggggcggccactcctctgtcccatggggtgggaagcgcagtgtcagcttttgagccggaggacctgtggggctcaccggcttcttcgcatctcagcgggtgacctcgagcctcagttcacacctgagcgccgcttccggctgtgctggtatcaggctcactcgggcagagccctcctcgggccgcctccccaagcctctccccccgcaggaggcctggccctggcgctgctgctgctgtcctgggtggcactgggcccccgcagcctggagggagcagaccccggaacgccgggggaagccgagggcccagcgtgcccggccgcctgtgtctgcagctacgatgacgacgcggatgagctcagcgtcttctgcagctccaggaacctcacgcgcctgcctgatggagtcccgggcggcacccaagccctgtggctggacggcaacaacctctcgtccgtccccccggcagccttccagaacctctccagcctgggcttcctcaacctgcagggcggccagctgggcagcctggagccacaggcgctgctgggcctagagaacctgtgccacctgcacctggagcggaaccagctgcgcagcctggcactcggcacgtttgcacacacgcccgcgctggcctcgctcggcctcagcaacaaccgtctgagcaggctggaggacgggctcttcgagggcctcggcagcctctgggacctcaacctcggctggaatagcctggcggtgctccccgatgcggcgttccgcggcctgggcagcctgcgcgagctggtgctggcgggcaacaggctggcctacctgcagcccgcgctcttcagcggcctggccgagctccgggagctggacctgagcaggaacgcgctgcgggccatcaaggcaaacgtgttcgtgcagctgccccggctccagaaactctacctggaccgcaacctcatcgctgccgtggccccgggcgccttcctgggcctgaaggcgctgcgatggctggacctgtcccacaaccgcgtggctggcctcctggaggacacgttccccggtctgctgggcctgcgtgtgctgcggctgtcccacaacgccatcgccagcctgcggccccgcaccttcaaggacctgcacttcctggaggagctgcagctgggccacaaccgcatccggcagctggctgagcgcagctttgagggcctggggcagcttgaggtgctcacgctagaccacaaccagctccaggaggtcaaggcgggcgctttcctcggcctcaccaacgtggcggtcatgaacctctctgggaactgtctccggaaccttccggagcaggtgttccggggcctgggcaagctgcacagcctgcacctggagggcagctgcctgggacgcatccgcccgcacaccttcaccggcctctcggggctccgccgactcttcctcaaggacaacggcctcgtgggcattgaggagcagagcctgtgggggctggcggagctgctggagctcgacctgacctccaaccagctcacgcacctgccccaccgcctcttccagggcctgggcaagctggagtacctgctgctctcccgcaaccgcctggcagagctgccggcggacgccctgggccccctgcagcgggccttctggctggacgtctcgcacaaccgcctggaggcattgcccaacagcctcttggcaccactggggcggctgcgctacctcagcctcaggaacaactcactgcggaccttcacgccgcagcccccgggcctggagcgcctgtggctggagggtaacccctgggactgtggctgccctctcaaggcgctgcgggacttcgccctgcagaaccccagtgctgtgccccgcttcgtccaggccatctgtgagggggacgattgccagccgcccgcgtacacctacaacaacatcacctgtgccagcccgcccgaggtcgtggggctcgacctgcgggacctcagcgaggcccactttgctccctgctgaccaggtccccggactcaagccccggactcaggcccccacctggctcaccttgtgctggggacaggtcctcagtgtcctcaggggcctgcccagtgcacttgctggaagacgcaagggcctgatggggtggaaggcatggcggcccccccagctgtcatcaattaaaggcaaaggcaatcgaatctaacaggcacagtgggtgactgcgaacgtgaaaccagggagggggctgggggctcggcgcgcagctgtggtctcagagctttgggaggccgaggcgggcggatcgcttgagcccaggagtttgagagaccgtcctgggcaacacaagagagaccccgtctctacaaaaaataaaaaaaattagcatagcatggtggcccatgcctgtggtcctagggaggccgaggcaggaggactactggagcctgggaggtagaggctgccgtgagccaagactgcaccactgcactccagcctgggcggcagagcaacaccctgtctcaaaaaaacccacctggctcaggggaggggaggatggtgttgcctgggtacgccttggtctcctcacctctctcctccccggcttggccacgcccagggcccccgcctggatcctgccccgccaccgccctggccaactgccccacacccatgtgtcttcctggtccccgtggctgcccctcgggctccccagaacatcctccaggaatgatggcaccaactcgaatccccaggggctctgcgtctcacccctcctctttgagggatcgccctgaggaccaggcagtgtccccgaggggtgtggtccaggcagccagggcgcggctgaggtggggtgaggagggagcgcggggcgggccgtccgccttgcgtgggaagccgcaccccctgcagatgccgtgggcgtttgtctctgccccccccaggcaccggcatcgtcagcccaggtgctcctggtgccctctcacccacccagaggccgcccgggttggttccgggcccccacctccagggtcctcccctgctgaaggctgagctcttcctttgggaaaaatggcgcgttctgctttctggaagggctttcctttcgggtctcactgggaagaggtgcaggggacccctgggattggagctcccttctcaacctgacttctggtctctgtcccgggaggggcccctttagtgtcccagggaggccattcttccacggcgaaggggccagctgtcaggtttatcacaaaatctccccgaattcccaccaaataagatgcaaacacatcagcacctgggcccaggggcttgttgacaacggaacgaacgaacctgccggcctggcccagtccagcccagaaacttacagaagcaggtgctgtctgaccccgaaggacagaagactctagaaacatcagatctgtcgccacagcagcggacacgtttaatggcaggcgcctctacagttacaaaacatgcctgaggtcagttcgccccctta

SEQ ID NO: 5691 - DNA, 450304 bp, Homo sapiens
  FTO gene - 52295569 - 52705872 of chr16; NCBI Entrez Gene ID: 79068; Build 35; sequence includes 20,000 bases upstream of initiation codon and 20,000 bases downstream of termination codon of the gene
tagttcaaccattgtggaagtcagtgtggcaattcctcagggatctagaactagaaataccatttgacccagccatcccattactgggtatatacccaaaggattataaatcatgctgctataaagacacatgcacacgtatgtttattgtggcactattcacaatagcaaagacttggaatcaacccaaatgtccaacaatgatagactggattaagaaaatgtggcacatatacaccatggaatactatgcagccttaaaaaatgatgagttcatgtcctttgtagggacatggatgaagttggaaaccatcattctcagcaaactatcgcaaggacaaaaaaccaaacaccgcatgttctcactcataggtgggaattgaacaatgagaacacatggacacaggaaggggaacatgacacaccagggactgttatgggtgggggttggggggagggataacattaggagatatacctaatgctaaatgacgagttaatgggtgcagcacaccaacatcgcacatgtatacaatgtaacaaacctgcacgttgtgcacatgtaccctaaaacttaaagtataataataataaaattaaaaaaaaaaaagaaaacctaggtgatatcattcagcatataggcatgggcaaagttttcacaacgaagatgccaaaagcaattgcagcaaaagcaaaattgacaaatgggatctaattaaactaaagagtttctgcacagcaaaagaaactatgaacagagtaaacagacaacctatagaatgggagaaaatttctgcaatctatccatctgacaaaggtataatatccagcatctataaggaacttaaacaaatttacaagaaaaaaaagccaaacaaccccattacaaagtgggcaaaggacatgaacagacacttctcaaaagaagacatcatgtggccaaaaaaacataaaaaaaaagctcaacatcactgatcattagagaaatgcaagccaaaaccacaatgagataccatctcacaccagtgagactggcgagtcaaaaaacaacagatgttggtaaggttatggagaaaaaggaacacttttacactgttggtgggagtgtaatttggttcaaccattgtgtaagactgtgtggtgattccgcaaagacctacaggcagaaataccattcgacaaggaaatcccattactgggtatatacctaaaggaatataaatcattctattataaagacacatgcacacgtatgttcattgagtaccagtcacaatagcaaagacatgaaattgacctaaatgcccatcaatgataggctagataaagataatgtggtacatacataccatggaatactatgcagccataaaaaggaatgagatcatgacctttgcagggacatggatggagccagaggccactatccttcacaaactaatgcagaaacagaaaaccaaacactgcgtgttctcactttaagtgagagctaaatgataagaacacatggacacatagggtggggggaacaacacacactggggcctgtcggagggtgaggggtgggaggagggaaagcatcaggaagaacagctagtggacgctgggtttaatatctgggtgacgggattatctgtgcagcaaaccaccatggtacacatttatctatgtaacaaacctacacatcctgtacatgtacccctgaacttaaaagttggaaattataacaaaaaaagttttttaatgtcatagatgaaaaggcagcaaggagactatctacaggaccaactgtaatcttatcacagccaacagattgcaatccaaacttggaatattagggatctttttgggattacaaactggtaccatattatggaatttactatcttttaaggttgaaaaaagtaatgctggacttatgtacaagatatgccaacagttgagttcttgtcacccatatttctctcagtagttataatcaaatggtatcagaacttcctgcaatcttggcaaatggggtaaatgaacatagaaaacaagatgagggtgatttccacgcatcagaagctgcttaaaagcacagcaggttagggaaaactgtctttagactagagttcttgacagcagttagtaggtcgagcataggcttatatgaagaatgttaagtaaaaacatgatttttaaatagactagataaacttatccttttatggcacatgataaagtattttaaactaattttgaccttatcaaagtgatatttctgttttaacatacctttgatctgtagcttgctgttctcgaagctgaagaagagataactcaatttcattttcttttctcctcaactgagttttcaggatctcagccaagtgctctaactcctctatctggcctctttgtgactgaataacgttttctctgaaataaagagcctctgtaagaacttgtagtttgaggaaaatttttcaatagttaagatcagtgcaaagaaagttcttcatgaaaaagagcaagcagaagttaaaaaatttagcttaagtgcctctgcacacagtgaaatagtagcagattaaatgtgatgacttggaaatacatacggaacaatgcaagatactgctttttataagataatgtcctaggcaatggattggactttggtttgattcaattgagtaagtatttattgtggagtacacctactatgtatgccacaatctggtcttcagaatatttatatgtctttgttctttcatatatgcacatctgcttataacacccaaattaacacttcagagagagagggcaggaaatttgccaaatataacttagtggtctctggcatgcatttatctctatcatgtctggcagcatcacactgtaatgagtctcaggaaccggtataaacgttggcttttcaggtgatcatcaggtaacaaggttatgtctagtcttttattttcctgcaggctaatcattactgtagctgctatttaaaatattcaaaaggaaacatttgaagaccatattattcttaagcaactatcttaagtatgatactgtgcgccatgttttcttttctcatgaagtattgttactttttgatgatccaggtgaaggcttaaagtggaaccttaccttcatttgtgtaactcacagacactgaaaccatgaggcttggattaactagaaaagtaagctaaatgtggcagaagtaacttttttgaaaccatatgatgaagaatgcagtgccatagaatcatacgaaaacaaaatctgaaatccatatgtatctgataactccaaacttttatgccactccccaattctttatttattttttttaaccaagaaaagggctaattgattcaggatctaaaaaaattacctgtgattttctgggaataaaaatgttgcctctaaatcttacactattctaactgactggactttatgccattcctctgagggtcaaattataataaagaagactattacataaatccttccattgaggcagctggataagttcttcattttcctttttctgagaacatgttatataacatctgttgttaccctacagaacatagctgtatttcagtggagcaaactgtttacatataaataaaggaaagggaaggataaaaaaaaaagacattatcaataaccaaagttctcaaattaccacaaaaaagaacacatacaaatttcttatttctcctctggcttcttcaagtaaactgttgccatattttgtaaacatgggatgtggagtttctgctacatctgcatcttggaattttatacctaaaaacaaagtaataaaatatgattacagaattgaagttagaaaagaaggatctttgatttgctataataaggatatttataataaaatctcttaagtattaagaggtatgtgttttatagtacacagaattataaatacactgccaaagggaatatgtgatctcagccaccagtaggcattaaataaaacacagcagcaagtattgctcattttacaaatctactgtagaaatcaaattacctagaaataattttattcaacttaagatttagactcctgcagtaatttctgaaataaatcagtcttctattcaagttttaacaatgtaaataggttataaaaacctgattttttccccagtgtttgtgataagggttttttaaatttttaaattattcatattccttgcccttaaatgtttaagtaaaaatgttttctgtattttgatttattccaccccaataacaaaatccctatttatgaaaaggtactttgagaatggatcatcgcaagaattcctttaaataaaacatttccctgctgcacttaaaatataatttttcttatagaaatctgtagaattttacaaagacagtcccattgtttaaaataaggcatattcttaattatgtgagttattttacatttatagaataactaaatattagagtttaaggtagataaagcatcacagatgattaaggtttttaaatggagaacaaaacaacaaatttattcctttagaaaagttaactttttaaacgtgagatttcattgctctgcatattctcagtaaagagaaaatttaaataaagaaaaaagagaattttaactagaacaatggaactattactcgctctttccaaagtagtcaatatctattgctgtaatccagaagaatagaaaaggctctgcctaaaacattaaaatagtttactgtgttagaatttgccaattgtattattttggcagtaatgctaattcttacgcttttcctacatataccatgaaaaaattcaacattactagtggaaataaaaaataatcaaaacatatcttaaaacttacagtctcatggtgatttgccaatggctatatatatatatatgttatatatatgttatatatatatataaaaccttttaaagattgatacataatatttgtacatatcactggggtacatgtggtattttgatgcatgcatacaatgtgtaatgatccaatcagggtatttaggatatccatcaccttgaccatttatcatttgtgttgggaatatttcaaatctcttctggatatttttaaatattcagtatgctgttgttgcctatacagtctactgtgctataaaacactagaactttttcttattttttctatctaactgtatctatgtgcccattaaccaacctcctttcatcctccccagcgccccatactcttcccagcctctagtaactatcattctactctctaccaatggttacatttcaaaacctttgctttacaaaaatctttgttccgttgtttcctcataataagtattgtttctatattacattgatcacacatttagccagtgctttccatcctttatcctgacaaggcacaaacagaaaacagtagtatttgtatagcaccttgatggtaaaggttgcttgtggccagagaggggttttagggttcttagccagccatcccaggctgagatattttcctgacaagtctcgcctgtctcagcctcaaaggtagtcctggagagcctgttaaagtgtcagttttggtaatgatgcttcaggtttactcataaagacggattaagaaagtattcatcactacttaatgctttgtgtcacttccatgtcctgaactctatcctgaacagtgagaaaggtctgaatcaccaagagagtacaaatgtaaggagaaattaaagtatgtagtcatgtttttaagagtctgctgatctgtggctcttaatttcgctatagggagaaacttccagcaaactctcctgtctgaacagcaatttatagcactagattagcttgccattttaattaacattgacaatattatgattttatcaaagagaaagtcaaaacttatttttctcttcctaaagacacttaaaagcatgaataatacagaaacaaaactttttttgtgttaaatgatctaattagacttcagtttagatttaatgtaaaatctgggcattatagacttatttatttatttttgagacttagtctcctctgtcgcccaggttggagtgcaatggtgcaatcttggctcactgcaaactccgcctcctgggttcaagtgattctcctgcctcggcttcccaagtagctgggattacaggtgcgtgccaccaagcccagctaattttttgtatttttagtagagatggggtttcaccgtgttggccaggatggtctccatctcctgaccttgtgatccacctgccttgacctcccaaagtgctgggattataggcgtgagtcactgcgcccagcctagactcacttatttttagagactgtgtctcactacgtcgcccaggctagactcaaactcctgggctcaagtaatcttcccacctcagcttctcgaggactttaggtgtacaccattgtgcctagcttgaacattatttttatttagtataaaagatcttgcagactttagagatcatcttgcccagttccagttccagatggcaaaactaaggttcagagaggataggtcactttaaaggtaaaatatattattgtgggagccaccatctcctgatctcttatctaagctggattattaccactccattttatagatggggaaaatgaggctgaggtcagtattatcttccatgtaaaacagttactcagtggcagaatgtactttctaatttataattcattatgcttactttagttgtattcagagtctactgccaatctcacatagctaggagtagccaagccctttcatcctgcagctgcctcctgcctgtgtggaggccttattgacttcaaaggaactctatctagggaaaagatagtgctaacattttggcttcaagagcgaactacaacaaatttttctccctttctgttcatagtggtttttcgtttttttttttttaattcctcaaagaattgaaactaaagttttacatgctactttacatccctaaaaatgtttggtctttatgtaaagtatagtctaaacaaaaaccaattagagctaaaacctaatttcctttcctactagttgaaattttaaaaacgttacttaagatatttattgaattgtggttccattataataaagtttctctgtgggtgaagagaattgaaaatttttattagaaatatttatgttctatattgagtcttgtctacacaatttaattactttgcaacttgggtacattttaggttattaatttttaaagtgaacaaagtgattggcctatgatcatttttagagatggaagagacctttatccttacttgtttcaatccttttactttacatgtaaagaaaactcagggtcagattgattaggagacttgtctaaggtcaccagccagtaagtgtagaaataaggacccaactttttaaacccctggttacatgcacatgccatgtcatgctaccgccatccaatgagaaagatttcaacacttttgcaaatttcgaaaaggtctttggatgaagaacttaaatgtgatcattcattacagtaaatgtggtcatatgtaagcaaactagctagtttccccacctgcctgagtacagtgggtttaaccaacccaaacgcaattcaactcattttacttagtttcacacatctcttacattaaggttatgtggaatgtttttactaaacaaatttgagactgatctagtgattcttaaataatcttcactgacaatattattttatcaaagtaaaaaattatttttctcttcctaaagacacttaaaagcatgcgtaatacagaagtaaaactttgtgttttttttgtgttaaacaatctaataagacttcagtttagatttaacgtaagctttgttttacctttcctggggcattcctgtaaaccagcattttcatttgcttttctacgcccagtgttaatacgagattgtacattattgtatggagtttgcctgtaaccctgggtttgaagttgctgtttggctgaaatcagtctgtttttgagggtttcattttgtttttcaagctcatgaactttctcttgcagctgctcaatcatttcttccatttccacatctcgtcccagccgcttggggccgccaccaacccgctcatatcttttcttgtcattaactagccgtattaacttggtggccattctggggaaataataaaaagatgaaaaggaatgtgagaagtcagcataaaatccattctgttgaaaggaacataatcactgtgaagacttcagtgcagaacctgaataataaatttcaggttttgatgtaactattactgcctgtgaagaatcctttgatgataattgaaaccactgggcaacaatctgctttatagcactgacaaataacagtttcctaaggcttatcatttaaggttagtaaagagaggacacatatttactccatatgttcctgaaacgcaatttttaacgcatgaccttatataggaatgctgtacgcacttaagtgtagttacagattgtggatgtggtgggttatatctgcaatccacagtaagttaaaacttttgaaaagtgtgttaagactgtgcagcatttaggtaatatattgttttcagtttctccaggattaagacacactataaatataaaaatgttagaatgcataaatgcacacatataaagcccaatgaaaaattcaaaagaaaccaaaatgcaccaataaatgttgcttagtgctcaagaaacacttgtgtttaatggtaaaaaataattagatgcaaaagtatcattttaatgctatctttaaatttggacataaattgtgcttttgacatctcaggagtttatacctttgattcttttaagttttgataaaaactggttagaaagaacaaaagacagaaagggcacatgggggtgatgtaatatacacgtacggaaaacatgcctgacagtgaatggaaaaatcttggcaggacaagaaagaaaaggtggctttgatgagagacacaagttcaagactttacaaaattggtcgcacatcttcaatagctgattctagtttatagtgaatctatttttataaagacccagacaggagattgaaaataaaaacacacttcatttttctttaaatgggttttgctttattttagcgtggttatggacagaagcttttacttaagggaacaaaagtgaaataaaaaaacctttaatagctttgggatgtcatagaacaaccttttttctgccctaagcagagtccgctgtaaatgcggtagtaatacatgtctatccacactctggctactcggcctacagcatgtggcatcagggagagctatgcataacataatcagttaagattgttttctctttcccttgaggcacatccattaagcatgctttataaaggatacaggataataaaaaccaagatccaagagtaccacaaacactctagtaaaataatcaatggattagttccttttccacctaattccgagaatgatatatcactgggaaatttggccaggtatcacagtccaagagggccacacactctacctggccctttaatgagtttagggtcctaagccccacccaatggcctgtgcacaaaagtaaggttgtcatatgaatgagacgtcaacctaaatatctgaattttctgttacagagagactttcacacagagatgtagattacattcaaaagaaagacacagatttaatataaaaaggcagttaacacccaggtaaaaataaatgaccctaatttttaaggcagggtatctttaaattcttcaaatgatattcaaataaactttgtcaagaaacatgattgcatctgtttgtctcgtaatagccatacattccatttgctggatttgattattttatcatattaatgaatcatacgtgatctggcaaagtctgagtgcttatttaaaaaggtagttttggctagacgaggtggctcatggctgtaatcccaacactttgggaggccaaggcagacggatcacctgaggtctggagttcatttgagaccagcctggccaacatggtgaaaccccgtctctactaaaacataaaaattagccaggtatggtggcaggcgcctgtgatcccagctactcgggaggctgaggcaggagaatcacttgaacccgggaggcgaaggttgcagtgagccgagatcttaccactgcactccagcctgggcaacaaagacttcctctcaaaaaaaaaaaaaaaaaaaattaaaaaataaaaaggtagtttataaaatctacatttatagaaaataaactatttacttttttgttttgttttgttttttagacagagtttcgctcttattgcccaagctcagtccaatggcgcgatcttggctctgcaacctctgcctcccgggttcaagcaattttcctgcctcaacctccgagtagctaggattacaggcttgtgccaccatgcccagctaattttttgtatttttagtagaaatggggtttcatcatgttagccaggctggtcttgaactcctgacctcaagtgatccgcccgcctcagcctcccaaagtgctgggattacaggcgtgagccactgtgcctggcctatttacttctaaaagataaatttaaagacagttctacccatgtatctaggtcacagtcagtggtgtgagatcgagaggcatttagagcttttgggtcatagtgttcattggatcattattctcgtagctaaagtaaaacgaactttcaggaggttaaatggcttgaacatacataccacaggctagtggcagagagataacagaatgcatacatacaacttgattcctagctcagtccttttcccattaaactacatggctcattattcagttgttttttattttctggctatgacaaattactaatgaggtcaaggatgtgaattcgattcttttactgaccaattaggcttacaaagaaaaaaattgttaggtggtcatagcagactacatgcctcattctgactggctgatgtgtgtgggataatggtcagaaaaggaatcaggcaagtgagtcacaaatcttgaaaacagccatcatcatgactaaaacccaactcaaagtaaaaggcctgcacatagcatgccagtgggttgttgaagtccacagagtagaaactgaactggaaccacctccttaggatggattctaagcagaaaaaccctattttcattcttcaatggttgtctcaccttttctttgaacctagaacataaatatgaatacagacctgctcatgattacacatctgaacacactttgtttttaatgccttcccctcagaaaataggcacagcatttctgaataaaaaagaatgaaagagtatctactcttaagaaatcatttttgccaagattttttgcacataaatcaaaagtgacaatactgtttcttcagaaacagtagagactctttgaaatcaatatagaatctagtataacccaagcaaagttaaatatgttccagagactgaagtgatgttttcattagtaaaccccaaatcttaagggaatgtgcattctaacaagttagaatagttagttactttttaaaactttcattttaaaatcaagacatttaaaaaacagatgctttggccatttgcttattaaactataaatattaaaccaaaagttatttataggtatgatatactaacggcactctattagcttttttcatttaaatagcaaattcagacataataaacactcataatctttttggtttattattctagtttgcaagattttccatttttaaaaattgtacttatttacatcctgccttgttccaaacaagattcaaggtggggtattcaattaagtttataaaataccataccctccaaattttactgagtcaagaaaaaaagctaaaagctttttatcataaccttttaattttatcctcctgcttgcgggcatgctgtttaagtaaaatgttctcatcatgcaaacgcaaaaatctgtcttccagttcctcacgactgacacgtgacactgcctggcgagacttcattgtccgtgttgttgaagtttctgcaaaaatgccaagataattaattgtgaggttacttaaaatagtctctagaaactcttgatattaatataatctctgatgcactcatctgagattttttcctttgtgacctacagttaagattgctttagaaaatgttgtaccattgtttacatcaattatttaaggtgagaataaaaatctttgctattaatactttatatacagttttaggaatttgaataacaatagtatccattcaaaaatgtattcaagtgccgttctttaagaatataagatggaattctgattcaataaagacttttgaatttacctgctgaatgttgtgacaactaaaagagtatccgaagcttatttttttacaaaggcaagagtaagagtaatttggtaaacataatataactaagatatttttctgtgctatgagtgtcttagaaaacaaactataaaagttgtaagaccaaatcaaaaaacccctaaatttaaaaattttcatttaaaagcttcacaaataatttctctttacactaccttatataaattttaagaacgtttatactctttagcatgtgtttatgatttctttttacagacgcttaaatttggtattttccgagccaggcttggtggctcacgcctgtaatctcagcactttggggggctggggcgggtggatcacctgaggtcgggagttcaagaccagcctggccaacatggtgaaaccccgtctctactaaaaatacgaaacttagctgggcatggtggcggacacctgtagtcccagctactcaggaggctaagtctggacaatcgcccaggaggcggaggttgcagtgagctgagattgtgccactgcactccagcctgggtgagagagcgagactctgtctcaaaaaaaaaaaagaaagaaaagaaagaaaaaagatgactcaataaaaaatgagcaagctgcttgaacaggaacatcactgacagaaaattcatatgatcattaaacatatgaaaagtttatcaatctccctctccctctccctctccctctccccacggtctccctctccccacggtctccctctccctctccctctctttccacggtctccctctgatgccaagccgaagctggactgtgctgctgccatctcggctcactgcaacctccctgcctgattctcctgcctcagcctgccgagtgcctgcgattgcaggcgcacgccgccacgcctggctggttttcgtatttttttggtggagacggggtttcgctgtgttggccgggctggtctccagctcctgaccgcgagtgatccaccagcctcggcctctggaggtgccgggattgcagacggtgtctggttcactcagtgctcaatggtgcccaggctggagtgcagtggcgtgatctcggctcgctacaacctccacctcccagccgcctgccttggcctcccaaagtgcccagagtgcagcctctgcccggccgccaccccgtctaggaagtgaggagcgtctctgcctggccgcccatcgtctgggatgtgaagagcccctctgcctggctgcccagtctggaaagtgaggagcgtctctgcccggccgccatcccatctaggaagtgaggagcgcctcttcccggccgccatcccatctaggaagtgaggagcgtctctgcccggccgcccatcgtctgagatgtggggagcgcctttgccctgccgccccgtctgggatgtgaggagtgcctctgcccggccgcaaccctgtctgggaggtgaggagcatctctgcccagccaccccatctgagaagggaggagaccctccgcccggcaaccgccccgtctgagaagtgaggagcccctccgcccggcagccgccccgtctgagaagtgaggagcccctccgcccggcagccaccccgtctgggaagtgaggagcctctccgcccggcagccgacccgtccgggagggaggtggggggtcagcccccgccaggccagccgccccgtccgggagggaggtgggggggtcagccccccgcccggccagccaccccgtccgggagggaggtggggggtcagccccccgcccggccagccgtcctgtctgggagatgaggggcgcctctgcccggccactcctactgggaagtgaggggcctctctgcccggccagccgccccgtccaggagggaggttggggggtcagcctcccgcccggccagccgccccgtctgggagggaggtggaggggtcagccccccgcccggccagccgcctcgtccaggaggtgaggggcgcctctgcccggccgcccctactgggaagtgaggagcccctctgcccggccagccgccccgtcgggagggaggtgggggggtcagccccccgcccggccagccgcaccgcccgggagggaggtgggggggtcagcaccccgcccggccagccgccccgtctgggagggaggtgggggggtcagccccccacccggccagccgcctcgtccgggaggtgaggggcgcctctgcccggccgcccctactgggaagtgaggacccctctgcccagccaccaccccgtctgggaggtgtgcccaacagctcattgagaatgggccatgatgacaatggtggttttgtggaatagaaagcggggaaaggtggggaaaagattgagaaatcggatggttgccgtgtctgtgtggaaagaagtagacatgggagacttttcattttgttctgtactaagaaaaattcttctgccttgggatcctgttgatctgtgaccttaccccgcaaccctgtgctctctgaaacatgtgctgtgtccactcagggttaaatggattaagggcagtgcaagatgtgctttgttaaacagatgcttgaaggcagcatgctcgttaagagtcatcaccactccctaatctcaagtacccagggacacaaacactgaggaaggcctcagggtcctctgcctaggaaaaccagagacctttgttcacttgtttatctgctgaccttccctccactattgtcctatgaccctgccaaatccccctctgtgagaaacacccaagaatgatcaataaaaaaaaaaaaaaaaaaaaaaaaattggtattttccatatcattgtgaagaaggtcgattttcaacaattctccaatagaaacaaagaacaactgatagagactaaggtcctgtgataggttactgagcacaagaattgaacttatagagtatcaaaacccaataaatcactttgcacacttacaagttatttgtataatacttgatactccctgaaagatctgcagagcaaagcttacacatactttttacttctaacaataaaatctgtgtagccaaaaattagccggcatggcggcgaacacctgtaaacccagctacatggcaggctgaggcaggagaatcgcttaaatccgggaggcggaggttgtagtgagcggaggtcgcgccactgcactccagcctgggcgacagagcgagacttcgtctcaaaaaaaaaaaaaaaaaaaaaaatttctgtgtagccaaattttatctttttcaataaacaatacattgaccacttttctggttttcacagtggccatttacactgttctgattgaaaagtgtatgtagattcctaaatggaatgtatcttaaatccctagccttctcaggctagagggggattttacgttttctatgagctgttgataatcgatacatgcatgacagcatagctgacacaatggacacacaaagataaacacagctctctgttctaaattgttctttaaagtagtgcttttctttctcaatttgaaagtgctttttagctctacagcaactactaagtgataaaaggataaagaaaacctttaatccatattaattcgataaaaaagtcactatcatgtgagatattccacttaaaaggcaaaacacttaaaatacggcctttcctcccatataaaatttaaacacaaagaaatgttttaacactgaatgtaatttaaaccaggcaattcagtttggaggcttgatactctctatgtagtttctactgatgtgaggaattttaaaaagatgatttatgttaattctttatcagaacagaggggggactgtacattttctatgagctgttgataactgatgcatgtagtaaaataccatatgtgttctaaactctccatctttttgtttagtccaatcaaggactatatagttacttaaatggtttggtttgtatgagtataagaaatactttaaattaaaagtagtcagtgatcaaagttcataactgtaataaataacagctggccataccttgtaaccctcccattccaaagaggtttagacctgtatctttcacaggcaagtctcctgcagtctcatcagttggaccagacatggcctagctgtggaaaaaagaaaattcaaataaactctttccaaattattacattaactatgcaatggaatgaaccaaataaaacgaaaaagggactagaactttaatgggcatcttattgtccacatgtgctgcttggagaagatgaaagcttctattctaatagtactactacattcagtcatggagacagtgttcctttcaacagtgtatttcctatagtttgcttaggaaatgaagtaagattatcatttaagaaatacctcctctccatccctttcctctccccagcctccaaaagaaagcagatatcttggaaaaaactcaggtcaggaacttgattcaaatggttgctctatcattaacaaactagtcaagccacctaaactctctgagtttcagtctctcagttttaaaaatggagaaaataatacctatctcagagagttattctaagggtaaatgggatgagtaaattaaaagcactgatcacatgtgcctgggatgtcaatattactcaaatattgtctgcttgatgtacaaatgagtgggcagttctgtgcattttgtgagttttgtgaaagaggtttcgttgcataaatttaccaactgggtttgtgtttttttgtgtgtgtgtcttgcctttgttgccatgaggcctaggtctcacccagggttcaactacttcaacatataggctctctagctaattctagtatttttgtagtttctattctttacagaaatacaccatagtaactctattttgagtatggatgtgagtggtccacacaatatctagtatgcaaaaataaaggattttatattttcatttcaatctacctagtaagctacatgcaaactgtgaatgaagatactctaaagggcagagttcttaagctctaggatattggttctagaatgtaaagaccaagacagtagcaagcttcattgtcttgttcagctctgtattcttggaggctagcatagagcgtggtgcattctgagagcaggcattcattaaatagttgttgagtgagtgaatggagtccatggggtttcagggtctgtgaacccagagatggtttaccaaattttgtatgtatatgtatatatgcaatatcttttaaagagggttcataacttttattacaactcgcaaatggtggagaaccattgcattttgcttttacagaaacagctaacagacaaatccttgggagatcatctacttcttttggaagtactcctatagaaaaggtcaatttttaggatcctgttgacacataggcccgtgtatgaaaatgattagttttccatgacagagttaaggtcactttaaaaataataatgatgatgatgatgatgatggtgttaacattcattgaacgcttactatgtgccaggtactgttctaagtgttctgttataggaatgaagtgtctcaccatatccttgtgaggctgttactcaaatgattcctgctttacaaatgaggaagctgagacacagattagttaactcacttaaggtggtagttgaaagtattaatagttgtgtctggtgatatttttggttgtcacaacaaggaagcgggatgctactggcatctagtgagtagaggccatggatgatgctaaatatcttacagtgcttaggagacataataatgaattatccagcccaaaatgttaataatagtgtagaagctgaaaaaccctgcacaatgctgcaatgcctctccaacaccatcttatgttatccttctttgctcactatgcttcacttacattattctttactttcctcgaaccccccatacccttgtcttgctcaaggcctttgtattagctggttccttaatctttggagctcagttcacttcctcagacaggttttccctgaccatcctatgttagagtagtcttccttacatttcttcactgtttatttcttttcttttcttttttttttttttgagacagggtcttgctatgttgcccgggctggccttgaattcatgggttcaagtgatcctcccacctcagcctcccgagtagctggaactacatgtgcgtgccaccaagcatggcttgtatctcttatagcaactgcctctatctgaagttatcagataaaattattgtttgtctccactaaaaaaggataaacatcttgagacgggtattagtcttgttcacaactgttcaggaacagtgcctggtacagggtgggaaccaacattaatatttattgaatgattggctgtgcgtggtggctcacacctgtaatcccagcactttgcgaggccgagacgggcggctgacttcaggccaggagttcgagaccagcctggccaacatgatgaaaccctgtctctactaaaaatacaaaaattagctgggtgtggtggcacacgcctgtaatcccagctactcgggaggctgaggcagaagaatcgcttgaacctgggaggaggagtttgcagtaagctgaggtcttaccactgcactccagcctgggcaacggagcaagaacctgtcacacacacaaaaaaaagaataaagaaaaaatatttattgaatgaataaatgaatatcaggtactgagattaaaatggcaagcaaaacccccgcctttatgaagctagcaagttatggaggtaatcacatgataaacaaataatatataattaagcaaacaatagaccactcaggaggtttagggtctaccaaccaactcctaatccagggcaaatgagcaaactgtgttagggacctacaacttgcaggatctggatagagatggcaattagcagcatcaactctcaccttcatggctgggatataacatttcaaattggtcctggacgtggggataaagggcggcctgtgattcaggcctgaggatgtggaggtgtcttgggctgggctgctttcacgccagcagaactccagggccaactccagggccttctccaggcggcagagcggaccctaggaccccggcccgcgctgcagtggggagggtcagcaacctccacccaccctcatcctcccccatcctcccgggtactcaccgtgccactggccctgcagctagctaccgttgctatagcgccgacagcgtggcgggcggctggccgagaggagcacgggagaaacatggcaggctcccgtagcctcctgggaaatgtagttctccttggactctagcctgtttgctcgcggggtagcggactacgctcttccagctgtcggacctgggaaattctcctgtgctaaatcccgtggcgctcgcgggtgtcgccgcggtgcatcctgggagttgtagttttttctactcagagggagaatagctccagacgggagcaggacgctgagagaactacatgcaggaggcggggtccagggcgagggatctacgcagcttgcggtggcgaaggcggctttagtggcagcatgaagcgcaccccgactgccgaggaacgagagcgcgaagctaaggtatgtcgggctcccggggcctggagatcttcgtgcgctgtgagcaaggatcagggaaccggaagggcttggtttgatggcgagcggatgcgcggtgttaaactaagggatgacagggccttgtcagcaagggacctggagatattagaggggatgttacaaattcgtgctcttcaggatgcaggccgagtcttgttggatcggctcaaaaatgagaagcaagatacccatttccttgtccttcttctgcatctattccttggttaaatttgtcgccatccctgtgcctcagtttaccggattctcagatgactgtgatcataccagctgtgctttctcataatggtctctgaggactgagatcggcttagatgaaatatctgtgcagtcagctgtgtttctttggaacaattgtctccgtgaccggctgataacagtttgtgtcttttagcgctgtggatatgaatctttaactacattgctcctctctacctttgatgttcagcttctggtagttgccattccatgggatgaccataataatggcaacagagattttaaaaagcatttattgtgggtcaggcactgtattaagtgcataatatttaaattatttcatatcattgtcacagcagattgcaagatagatattatacagatggagtataaataacagcccagcttcacagatgaagaactgaggctcagaagcattgagtgttttcctttctctcattcccaaactcagatcctgttgatttgtctacgtatattgggaatatgcccactttttttttttttcatctccactaccttggaccaagctaccattatctttttaatagactgttggaatagcctattgattggcctacactcactctacaccctaacttaactcttcttccaccttctctcccttccctcaactaccattctcttctgcacaccatagagtaagatcttcgtgaaatgcaaatataattatgtccctttcctttctccttactctgccaaccacctgtttaaaaatattccatggctttctgttgctcttaggataaaggcaaaacttcacattgcctacaagatcctgcatgatctggaccctacctgctttcacaaccccattggatatgacactctgctctctgcctaccagtcactttggccttcttaaaagtcactcttcactatactttatcgggcttcagggcctttgcacatgtcatttgctgcctactctatgttaggcaaatattggcagtgaataacagtgttaaataacgtagacacagttcttgctttcatagaatttcatcttacacgtgagtctgtttagggcaatacacctaaggatttaaaatataaaatctgctctatattgacctgagttattgcagtatttcgtaagggaccagaagttttcatgcttgagtctgcatatgatgtggataatatattaaagataagcacaaagagggcgacccttctgctttagtctacacagtgcaaagaaacaaatgtcacctcatggtgttgtgcatgatgtctttctcatctttcaggtttatttttaaagtatttcatttattctgtgaagatttgttgagcacctattatttgccataagttgggattataattttggctgaaatagaatcactgcaccaaagaagctcttactctattgaaaccataaccattgcctgtgagggagttactagtgtcatccatattttagagatttagaaactgagacttgtaggtaaatcgtgacttgcccaaggccacttggttgctaggtgaaactagtgctctgagccaggtcttctgactccaaattcaaggcttttcccattttctgcttgtgaaacatgttgaattagtagagcaaattgtcttccttttttctttaaaaaattggctgttcatttaaaatttgtttgcttaatattatttgttagaacaaagtataagtagttgttttaaatcttaaatgtaaagtgtccaatggctcatgaattatcttctctttttctaatcaattttattgaggtataatttacatacagtcatttgcaaccatttttgtgtacaatttgatgccttttgacaaatgtatatacctgcaaaaccaccacagttggcatagcgaacatttctctcctaagttccctctcgttaatttgtggttagtctgtccctccaccttggcccccaaacaaccactgatatgttttttgtctctgtagatgcatctgtattttctagatttcatataaatggaagcatacagtgtatacttttgggtctttttttcattcagcgtaatgatttttttttcaaaatagagatggtgtcttgctgtgttgcccaagttggtctggaactcctgggctgaagccgtcctcctgcctctgctacccaaagtactgggattataggcgtgagccactgtgcctggccagcataatggtttttgagattaatccatgttgttgtatgtatccataatttgttcctttttatcgcaaattagtggcccactgtatggagataccacatgttgtttattcattcacttgttgctggacattaggattgtttctggttttggactcttatgaaaaaagctgtttttaccattcatgtatgagtctttccattttcatttctgtcaaaaaaagctgctatgaccattcacctaagagtctttacatttttatttctgtcgggtaatgcccaggagtagaattgcttagttataggggagttctttgtttaaccttatgaagaaattaccagttttccgaagtgatttgaccatttgttttagtttcttatggctgctgcaacaagttaccacaaacttggtggcttaaaacaacagaaatttattatcttacagttctggagatgaggcattgaaatcaaggcatcaatagggccatactccctttgaaggactctaggggaaactccttccttgcctcttccagcttctagtgtccctggtgttccttggcttgtggtagcatcacttcataacttctctgcttccatcttcacatggccttctctctgtttctgtgtctcaaatctctctctcctttctgttaaaaggatgccagtcattggattaggacccgtcctaaatccaggatgatcctgagatccttaagagcctcaacttaattacatttgcaaggacactttttccaaataaggttacattcacacgtgccgggtttttggattcggacatatctttttggggaacaatattcaaatgcactgcacccttttacattcctaccaactgttagtaggaatgtaaaatgagagttctacttgtttcatatcttttcatcgcttgtcagtcttttacattttaaccattctagtaggtgtgcagtgatatttgattttaatttgcatttcagtgatgactaatgaggttgcatatctctctttttgtaaatctttattgagtgaggtataatttacataccataaaattcacctgttttcagtgtaggactcaatggttggtagcatatttgcagagtcgtgtaactgtcaccaccgtcttattttagaacagttccattccagaagaaactttgtattcatttgcagttatttctcaattctacttcctccctagggaaccacgaatctactctgttctttagatttgccttttctggacatttttatatagatggactcatacaatatgtggtcttctttcacccaggatgtttttgaggttcatccatgttgtagcatatattggtactttgttcctttttattacacagtggatagaattccagtgtcaggccgagcatggtggctcatgcctgtaatcccagcactttgggaggccaaggcaggtggatcacctgaggtcaggataacttagatcaagaccagcctggccaacatggtgaaaccctgtctctactaaaaatactaaaattagccaggagtggtggcacatgcctgtaattctagctactcgggaggctgaggcatgagaatcacctaacctggaaggcagaggttgcagagagcccagattgtgccactgcattccagcctgggtgacagagtgagactgtgtctcaaaaaaaaaaaaagaattccagtgtcaggatataccatattttgtttatctgttcaccagttgatggacatttgatttgtttctacattttgactattatggaaaatgctactgtgaacatttgcaccctagtttttgtgtggacgtgttttcattcctctttggtagatacttaggagtggaattacaggacttatggtaaatctatgtttaacattttaagaaactgacaaactgtttacttgtgtggctacaccattttacatttcccatcagccattttgagggttacaattttgtcacatccttgtcaacacttgttgttgtctgtcttttctattgtagccgttatagtgggtgtgaagtagtatctcattgtggtttgatttgcatttctctgatgggtaataatgttatgcatcttctcatgtgcttattggacatgtgtatatcttcttttgtgaagtgtctgttcaaaatctttgcccatttttttgttggattgtttgtgttcctattattaagttttatgagttctttatattttctagatataaatcctttgtttactatgtgtgttgcaaacattatcttccattcatctaggttacttaatagtttttaagaaaggtccactttatcaatgtttatttttatgattcatgctttttgtgtcatatctatgcagtctttatcccaaagtcacaaagatttcttttttgctttttaaattaaactttgtcatccccataatgggcacttagtttttatttttcttttctctttgaaataacttagatcatattttctctcttgtgattgcttatgctatggacttttatgctgtttccaagtctggagggtgaataagaaggttggaccacatagctttctacgattaacatttatttaatttgtgttaagcacatgagaatactatacggtattcatgcatttttaaaatgaacttttcttctaaggcatataatagaacagtccagataagtatttgatggtttgagttagaaccatggcgtctactatttccttactgtagggataggggattcataccccgtgcctcagtttctccagtcattaatgaggttaagaatagctgcttctgtgggttggtgtgaggacccagtgtgatgaggtctagctactattccaggggtagagtagcatgcccttgattgagtttggtggcctgaggggtcctctgctggggtggggctggccctatgcattttttcccagatgttataatttattattttgaaatgatttaaaacttattgaagagcaagagtagaacctagagctctcatagacctgtttgtccatattcacaggttaacatcttgctgtgttcactttattgctctctttctcgccatatatatccacatgaacaatttttttaatgaaccattgcagagtaagtcggagacatcagtcctctttacccctaaatagttcagcatatatttcctaagaacatggacattctcttgcatacaaatataaacacaatcaattgttaatttcagaaaaagttaacattgatataatgctattatttcatccaaagtccatattcaaattttgctaattgtcctaataatgaattttatagcatttttttcctggtccaggttccatctggattgcatattacctttcattgtcaggtccctttggtctcttctcctttaatctggtgtcctttcatgtcctttaaattggttcctcatcctttttctttcaagacattgacatttgtgatgtgtgcaagctatcttttatttatttatttatttatttatttaatttttttgtagaatggccctgtattcttatttgtcttatgtttccttatgattagattcagattttgcctttttttttttttttttgagaccaagtctcgctctgttgcccaggctggagtgcagtggcgcgatctcagctcactgcaacctccacctcccgagttcaagcgattcttctgcctcagcctcctgagtagctcagactacagacacgtgccaccacacccagctaatttttgtatttttagtagagatgggtttcaccatgttggccagcctgatctcgaactcctgacctcgtgattcacctgcctcggcctcccaaagcgttgggattacaggcgtgagccaccgtgcgcagcccagattttgcatttttgcatgtatatttttgaggaaagatggggcctctagaggtcacatatttataatccacatatgcctcctggctgtaggtaagttttatttggcccaaacaaactaaaagttgtttcagaattattttctaatatttaaaagttgagggatttcacataaagatctgggtgtctgactctcttgaaaaacttaagtatctggtaacagtgggcatgcattttcctaactagaattgaatagtggcttcccttttaggtgggaaatgtgctttccattttgctgtcatccagttttgccccttaagttacaatatagtggtgtagtgtggagctttagatgcagactcctgagattgaattctgctccctcatttacttgcgcaagcaatttaacttctctgagcctccatttcctcatctatcaaataggagtgatatggttctggtagggattgagatattatatagcacataaaacattgctggcatacagtaaaaataaacattgttatcatcatcattatcaccatcatcaccaccaccttcactactgcctatctgaccccagtagatatatattctgtatgtatatatatatatatgtattctgatcccaggacgtttattctgtaaacttatgttgagtgtctagtcaagtggattttctcaaatggggttccattaacttatttcccatgcagccagaatggtactagttttgtaccacctttcagaaaattgagaatatagtcactcaaaccattttctgtgttctgtggttcagataaggaacctgattaagtgtcgagtagtgtactcagcaccagggtaaagatggcagacacagtcccatggaactggctggctgtccatggaaggtaagtaagtaccaacagcagagtggtgagttttatcacgggaggacacggtagcaaagaggatctaacatggcctagtagtcatggaattccttccttagaagatctgtttaaaggtgtatccttatgagaggcctgggattccttacggggtttttcagaaacattaaaactgtttcattagtcatggaataaaaagctatggatgttgaaatccaagttagcttcaaagactcttatgctggcttaggttagataatcttttaaactattaaaaatagaactagtttattatggaaatggttatatacctaagaacatttaataattttgtttgagtaatgtacatttttatcaatgaaggaaaatatccagaatatgtaacctaccgttttaagtaacatgatttaaaaactcttctgcttttggtgatagttgtcttatcaactttaaatgataaggtttattgagttataaaaataataacttggccaaatgcagtggcttatacctgtaatcccaatgctttgtgaggccaaggtggaggaggctcacttgagaccaggagttggaggttacagtgagctgtgattatgccactgcactccaggctgggcaacagagtgagaccctgtctctaaataataataacaataactcaacaaaagaaagtttgttatttatgtttttactgactgggtatttttaccttattttatatttcaaatttggcattttattgaggtcctgagaaggttcttttggagtctacttttattatgggccattctagattatgtcaccagtttatctaaagtggacactaaatataggacagttttggtgttaggccaaagaccaggggacttgaaaaatgaaaacctcacctgacagattctactctgttttttttccttcttcccgaaatccattattattttttgcttaatctctccttcaatatatgggtaagcctttaatcactgtttcggaggtttagttgacttctgtaaatagaagaagagttagtgtatttgatcatagtttccaaaccacttttaatactgtaccttacttgaaaattaaccagctaaactatcgagtaacagtgagttcttgttgctttctgttatttccaggctgtttcctaaccctcctagtactggttttgaaaactaaattagccattcaaaaaaactcttagacactttgagcaaacagtagcttccttgaagatagcatttgtgtctaattcatcttttcatctctccattgtacctggcaggatgtcttccacaaaggagacattaataagtatctggtgaagaaagattaaatggttgagagagtccagcatctgttatgtgatatatgtgacccttcataattatgattctggatccttggctgctaatgagatttactgtggctgagtttagtgatacagattttggcatgtagatgatagtctccaaaaaagtagagatcatgtttttttttttttttccgttttgtcattcaccattttatccctagcccttaagattttgccagacacatggtagatattccatacttgtcaaacaatgaatgaatgaattcccaagagcatcacttgttattggtcagtagactttctaatagtgagagatggaaccggaatttgaaagaagtaatggaaaatggttaagtaccttatgaattttaaattaatataccataggtgtgggcattaattttgagaaacaagactcttctgttcaacacatactttagcaactgtcaacacttgttttcaagtgttctcttccaattttaaaatgccagtttacctttcagatttagagtattttgttgttgttagtttattatggcagttttcttgctaaagttatatttaaagtgtgactttctaacttctagaggagaggaacttttgttaaggtggtacttttggaaccttaatgaaaaacacaccttagagaaggtgaatttagagttctgctaagcacattcatttactcttctattataaactggttttgtaatattttataaaattgtctcactggttgatttcacaatgtaaactgggaggattcttaggattccttgggttggattagaacaggttcaagagatgaagatttgtgttggtaggggcttgtttccaaacgtttgtccttggcatgctctttgttaagccatcacatgtttgaaagttaaaccttgaattggtgccatggtttgcatttaaaaaaatgtattttattatggtaagaacacaacataagatctactctcttaccacatttttaagtgtacaataaagtattgtaaactgtaggtacaatgttgtatagcagatctctggcactgattcatcttgtataattgaaactttatgccgcttgattagctctttcccatcctcccagccctggtcatcatctttctactctctgattctatgagtttgactattagacgtacatttttgtttttgctataagcatctgtcctgttgctatgctgatcatttatttactctgtagttttggaaatgacctgcttacaagataaccatgcctccccttatgttaaaaaactgccatatggataaagggcagttaagacctttacaactggtagaaaccaagtagaaaattcagtttgaaggaccaaattatgttgcagctgctctgaggaggagatttgttgccagagcatgagtgttttcataattgtttgtgatcagaaaattcagagctctgatttctgcattagccctaagtctgccctttggcaccttcatttagtgattggatcattcaaggctgagcctcaagggccagcatttctccagtaataatataaaatgggctgatgttgcaaccttaactcactctgctgaattgggcatgattaaagtctcaaggctgcattaatatggattttctatttctatgtacagccgtccattatctcactattttccagtttgccattttttgaaaacaaagatggaaaattctgctgatgaaattttttttttgtctgtcagcacaacagcattttttgggcttaagaatatgagaatagcaccgggcaaatgaatgcaaacattacagtttatgtggactctagcctgttgtcatgtcaatcttgttatttaggtaaatagtgtgcaatttttcaccaaatcagcagccaatatgctgcgagccatttttgttttagttacattattggctggtaacactattaatgagacaataattgggaaatagtagtcattgttctcataaaacacgatccttgtgttggaaccacagccaggcagaggagttgcatatgcagactgcaagggaggaaaggatgagtagccagtgttcccagcttttaaaatcatcagacccctgctgcttaaattgccccagctgttaatgctggaaccattacagtaatggactcagcaaatgaaggagaacgaagacacgcacactttattaccagaggggcaattttctcttcatatgtaatagcagcggtgcctcatattgatcagaccatcaagatactaatcctctgtaaaattactttttataactgaaaatgtgttaatccaaatcagtctgtgtcctgactgtctacttactattgaatacggactattagatgctttatttttcatgatttaaaggctttgccctgaaaatggttggcttttcccttgcaacactgagtgcttaatcttagctatagcccagggttgtctttttgttttaaacagaacatcacccacttaattaaggagtgagtgtctgtcttgctgagttatgctggtgttttatgttcctctggatttattaagcatcttgttttacattcagtctgcggtttgtgctgtaaataaaaataggcccatcttgcacatattagaaatttgcaggtagcaaatgtcaataagtaccagggatgtaaggttctttgatttatacttcaggcaccaggttgtggtttgtcgattgaacccataggcaggatgcatcttggtgtcttctgtggagcagatgtgtttttgcatcgttgtctgagaaagtttatgtttatttctgcatccttggttcagtagattgcttttcagacaatgaggcatatccgctccgcctcttatgtcttgtgagaaatgactacagctaaacattattatgagaagacccattaaaaactgatttctatcttcctgaatatttggaattttgggaactttgtaaaattcccatttttttcattataatctctttccacataccttatatgtttatttgtatatagactcaggtgccctcttggcagtatatttattctaatatgttgttatagctgaaagcatttgtgtgacattctctgtagagttcattcagaaatacttaattagtgtaccctttgtgtaccaggacttggattacaggctggagacttgaggaagtgtaagatataatctttgctattgaggacctcagtttaggaggaagacaggcatgtaaacaaataattataataatgcagtatagtaaatactagtctactgtgaatgtgtacttcttgggagcatgggcgcaatagtaaaatcagcctcattggttttttttgctgtgttatcaaaagcagaattctgacatccactttgagacttgtttctgaatgactcgtagctgtttgaaagaaatctcttccttcctcactggagacatgtttaccaccctagggggatagtcaaaggaaagttttccaaaaatgttttgatcaatgatcacatctttggatatgtatagagtttcccaaggaggctacttgaaaggagatagtgcttatgttgtttatgttctggcatttatgtataaatcagtcttattgctttagagtatagtttatgaggagaaactgtagcctgtggtggttaagaacgtggaatcctttagctctatttactggctgagtgatcttgggcaagtcacctattctccttgagcctcaatcttcatctgtaaaatggggatcataatagttgtgaagattaaatgatttaatatatgtaaagcatttagaatattgttggggtaagtgctatataaggttattattattatgcgtgtgactattaatgaaattatttttcatatgtagcttatgaaagtcagcttcgtaaatatagaaccacactgtatatataagtatatggtatgtgagatagagaagcatttcttaaatttcttaatgaaattttttttctgattacataataattttttattttagaaaaactaacaaatatggaaaaatatgaggcagaaaaaagtctcatactcttcagagataaatactgttactttatattagtgtattgcttagaatattgttattatgcttatatataatatatacagtatgactaattttaaatatatttatgatctatatttatataagatatattttaaacaaaaattagaaagataacttgcatattttttactctgcttttttttaccatccagtatattatatttttttcatataattccaattgtatagtattttatggatttttttccatcctatcataggttatcctttagtgaacattcttgtacataaatctctgcaaatctttggaatgtttcatagggtaaattaaaaggagaattgtatgggctaacttttgttaagatttttggttctcattgtcaagttgccacctggggaggtaatgccagtttccaatttaaagaagcaatatgtcagaatgcttattggtacatccactctaacactgggaattatcagaaaacaaaaatgtttgctgatttggaggagaagtaggaacttgtagaactaatttgtattttcctaattattatatttggttgaatttcctcccaccatttatattggccaaatatagttcttttgtgatttgtttattcatataggctttgttcattttgctaacgtgttcgtcttttcttactgatttggaaaaatattttgtagattagggatgttatttactaatcatgtgatagaaatatttttccagtttgtttattgcctgacttttatatttttgttattcaaaagttttcctttgtttttaattagaaaaacattttccctgtcagtattagattaacagtcatgcattcttctggttattaatattttatgtttttttcatgtaattgttaaaatgtgtctagaatttagttggtgttatggtatggagtagatgtggaaatttttcttccccaaggccaatcagatatcgctgcctgcatttattgacttatcttttacgtactgatttgaatgcttaaataatcagatctgctttttatcctgtttgtttttactttgacacatcattttaattgccatcgatttataatatctttctaaatttggcagcatgaggcccctataattagtctttactttcaaaaattctgtggctcatctcttgctttgagaagacaacctaaattttttcccaggtaaatttaaaaatcaccttttcaaggtcccccatgtgccccaccagtcttttggtattttaattgttattgcattaaatttatacattaatttggaaataactgaaatatttgtggtaaatcatttttctcattcaataattatctgtctctacatttatttaagttttatgatcttcagaaagctttgtaattttgttcaattgggcaccatttattactttatgtaaaatacgtgggtattttatatttttgattactattttttggttactattgaaaatgggatatttaaaaattgtgttttttaaatgatacttaagaaagttttttatgtgtttgctatttttgtatttggccacaatacagaatgcattcttatcattctaatagttttggatgattttcttgggttttctggatatttacgaggttgataatctacttatctgcaaatataatttgttttttcctctttcagtaattatactctcctctcctttttttttcttctattattaccttgtctagaacctccagttggtagtggttatagcagatagtcatgtcttcaacagttatacttcgggattctagtattaagtaaagtggtagttgttggcagttatctttgattcttactttgtttttttcagggactgaggttgaattttattgaattttaggaacattttttggacatctctttagatggtagtatctttacttctactgataaaatgtaatttattagactttctaataatggttccttgggataaagcctacttggttatattatataggtcttttaatatattgctgaattcaacattttagtatatttcaattaggaaagtaagatgggtcagtatcagggattcttatggaaaccgcagagtggtactccaggggttgagggtatatcagaatctttgaatggggcatatataacatacatgttgaacataattcaagctacagtttgtaaagcctaataaagcatttttggctgatggggataagatcacagtagaagaaggtaaagtgaataaaaatattgagaaactcctttttgtgctttcttttgtcaaatttggtatcgtattatgctagtatcataaaatgacttgcagagttttcctcctccctgtcttcttgggaaccatttacaaagcattaggattatttgcctgttggaagtttgaactttacttcttcttcttctttttcttcttcttcttttttttttttttttttttttgagcagagtcttgctgtgtcacccaggctcactgcagcctctgcctcccgggctcaaacagttctcctgcttcagccccccgagtagctgggattacaggcgtgcaccaccatgcctggctattgtctatttagttttcttcttgagtaaattttggtcattatatcttagaatgggagagttttacatttattgacatggcattgagcataacattctctggtttactagggtagaattgtgtatagttttataatttaaaaaattccatattcactttttccatcttcttttaaattataactttgtacattcttgtcttctctttaaaaattgactatatttgctggtagtctgttttttttttttttttttaaacaagctcttgaatttgtttatgctctaattcattaatttctacctttgtttttattgttttctttgtcctgcattgcctaagcttcttttggcaacatcttgagatgaatgcttacttattcatttttattcttttttgtttaatatggaaagtatttcaaaatcttaaaatagttttatctttttggtttctgtagcaatttgtgcatgtttttgtagcacttattcagtattctaatgatttttttcattttctttctcataccttagttatatagactatactttatttttctttgtaccccaatgtccgcagagtcttgaacacaataggtactgaactaatgtttcctaaatgaataccctgaattcccccattcccctttcactccacacaaatagtaagtagcctgctatagttagtggaagtttagctctccaactaccagtgcacatcactggtggttggagggctaaacttgtagtctcacattccaactaccagtgcacatcactagtagttggaaggctaaacttggagtttcacatatgccacttactacgtattaccttgtatgagtcctccaatctctgtgatgtttcatctgtaaaatggggataataactcccttccctgcttcatctgagatgtcatcaataagataataaatgtaaaagaactttgaatactaacaatgttatgtagatataaatatgatttaaaataggtttttagcattcttatctcatccaccacttctccccctccccaccatgtagaaattatcaagttcttaggaacagaaacttattttgaaatagacaatattgtacatattcatggagtacatagtgatgttttgatacatatcgtgtatagtgataagatcaggataattagcattttaatcatctcaaacatttattatttctttgtattaggaacacagaaacttaaaaagatatatatatatcttttatatatataaaatatatatatatcttttatatatatataaaagatatatatatatctgtgtcttccgaagtatctagcacagaactttgttgacagatatacagtaaatatttgttgactggatgttttctgagatgtacttttctttttctttttctttttttctttgagacagagtcctgggtcctgctctgtcacccaggctggagtacagtggcacagtcataacttactgcagcctcgacctcctaggctcaagcagtcctcccaccccaggctcctcagtagctgagactacaggtttgtgccaccaagcctggctaatttttgtacattttgtagagactgggtctcactatgttgctcaggctggtttcaaacccttgggctcaagctatctgcctgccttggtctcccaaagtcctaggattacaggtatgagccactgcacctggcctgagacctacttttcaaacatgaagtactaagtgatcctcaattggaccaagacttaggagccctgccccaatcacgttgcttctcccagtttactcggggtgacctagacagctacatcaacacacagtctggtgaaatgcacatgcgtaacttgaggatgtcaaccttttggcacagtctcatttcctctgcagaagagcggctagagacattatactctgttcccgaagtatatagactaataaaatagtggagttgatttagattgataacaaattataaaattgataaaaaatattttctatttttataccatttagaacagctattaatatttttaaaatttttttctcaattggatgaaaaataaatgtatgattattccttccctttcaattgcagttacattacattttcattgtttctcttgcactgagatttattttttatttttagtttattttgttcattgctatggaagggtgataattgtatcaagtaagtctcttttacttacctgagagttcccatgttctttggggaaataaatgtcatcatataagtcagtcttaggttaacaggttgttttaaaattgctaaccactatccaaatgcagagtgatagtattttctgggtaggtatttcatactctcttttcgaatattggtcaccgaaggatttcacaaaccactgacatttcagcattatgacagtgcaatgtgctcctgtcaccctctgaccccatattttttttaaaccattcatttcaatcggaaaaagtataattttttgaaaaaacagagatacttaccctttgcgctgcttttaaagattactgggagacttcatatctcagataattgatggtaaattctgcttggttgtttataagctcaaactttggagatctacaaaaagagtttcatctgagaaataaaaactattttaatgattgtatgatccaccagactgtgaggtcttttcttcagtccctcctctttcatgaagcgtttgaggattattccattcatctctttccttaccgactttatttcctgtgtcaaaaagtatgatactaacggtaagtttgtgtatggtacatttactggtgtatggtaccgtatgtggttgacgttaggtcatattaaattttacattttgagattgcttatacatagtagtgttttatacacagtaattctcttttccctatggggattataagatccctctggctgacaacactgctataaatttgttttttgtgtctagtaagatgctacaaatgtggttgactctcagcatttcttgtcaaatggaaacatgtatagattggaagttaagctttttgttttttgtttttttttactttactgaacagttatttaaccttaactcttaatctgctctccatcaccagtagaaaatattttgtttagaaaatgttttgtgtaggctaggtgtggtgactcacgcctgtagtcccagcactttgggaggacgaggcaggtggatcacaagatcatgagtttgagaccagcctggccaacatggtgaaaccccgtctctactaaagatacaaaaaattagccgggtgtggtggtgtgtgcttataataccagctactcgggaagctgaggcgggagaatcgcttgaacccgggaggcggaggttgtagtgagctgaggttgcaccactgcactccagcctggatgacagggtgagacgccacctcaaaaaaaaaaaaaaatgttttgtgtaaaaccatatgacagaatagatctgaggaaactgcatttgtagccataggagaaatcatagattttggtggctctttacctatcactgtgttttttaaaagagttatgtctgaaccacctatgtgtcccgattcattttgccatttcatctactgctcttcctcctgtttttatttaagactatgaagttactttagtgtaactgctgctgtcacctttgcccttagctaatcaaatagtttaccttgagggaagcatttatctcccactttcattattattatttttgtagctgtaaagatatatattttatgtctgcagaaggctgtaacagtgaaacgaggtattgatctgctgtatttagcaatttctttccaccttgccatcaatagcatgtcagcatctgtctgtaccgtggttgacctcacaaatagctctttatgctcccattggattcaaatgatatagtatgctgaaaactaaatcaatgaatgattataaagtttttagtattatttcatgacctggaggcaactggtactccttgcactgacagttcagtgtacaatgaatatggtaaaatgagtgtgtctggcctttgttctactgaaaggaggaaaacgggtcacctggttgggtcagctcatacttctaatgatctcaaagcacttaggcacttcagttaaacatctcactttacagaatcaggcagagagaagagcaagactcctatttaactttattccccatgcctcatcacaagtatgtagcaaatgtttctaaaattatttgagctataatcatataggcttttgccttcatttataaaagaaagacaaaaacccaaaactagatgctttgtcactgtcaccaaggacctaacgaaaaggcacatggtggaaggagggagagtggtaacctaggtttaggtctaaggggactcttgcttgctgtcagcacctggtacaaataccaagatagggtttttggggccacattttccatttgagggagttcctactcacctccactgatctgtggaacactgaaatagcaggagtcactaatttgcctgcttttggatgttgctgaattcagcatcgtcttgaaaagttcttgccgaatcatacattcagatgaaagatgttttagatattaaacttgacatttgggatatatggaaagatagaaccaggtgatggtgggtgaacagggaaagtagaacccagcagttgtcatcctgatcttttgaggatatgaatcaaatctatttatttctaagaaatgccatcctgatgtactcctttgtccatcagcccagtaggaagtttgacaaggagtattggggagttcacatactaattcattccccagacatttgttggatgaataatgtctgaaaaatagggtatcttggctgtattccttacagatgacgggttatctcctttccccagggtcacttaaggaagagtggatgatagtgatcagagcttaaaggtgttggtctacaccagtgctgccacgaagtcaggagtttgagaccagtctatagtgctggtgtagaccaacacctgtatataatgtttattttcaagttcatttgtaccactaaatactgtctctgatgggggccactagggctctatttgtgattagaaatcctattgttgagaattattactgtgtcctgggttagagagaatagatatgagggctagctcctcctcttgaatgttcatgggaaactgtcatgcttggctttagcaaatccagaatgtgtctacctgccttttttggccaattgccattattccccccagtaagatatttgaataggggaaataatgggtggattttatgaccatttcatgtctggtcagtttcttttcctacatgaaaggatgaagtggggactcttcatgtaaagccacagagtcggaagccccgaggaagaaattcagcttggtcctctgaatctgggattgagaacaacaaactgaggcaccataccctctatttcctgtagtataggaaattgctgataattaataattttagcattgaacttattcaagtccagtaaaattttcttaggatctgctcagggatctgcctctcctaaattcttgggttacttttgttattcattatggatatgtgactgattaatcagctaagctgtttttgaagtcattttaacttttgttctgtattatcctttaggaatatgagtaccattagtactttgtgatgtctacaggagtacttccttttcatttgtcctgtggtgtctgaaggagaactttcttttatctttcctgtattagttcacgttatactgtgaggtttgcaactcaggtctaaatacaggatttgggaaagatgttcctgtctctcaattcagtctttgtgattttatgtacatatatgcctgaatattagataaggaattttcccactcagattatgctgctggaaagagaagtcacttcatattcaaatctttctcaagtcttttgtattgtagaatgatcttcattgtgaacggcattatttggtcagctatccaaatagtatgtgagtgtgtacttatggcttggaatatttttctggatcaaaactatatgtagtaatctggatttatgcaccataatttctattttttgcctaagagtggaaggttgctacatgctcatatagtacttaaaataatttatgttttgctgtctgcagatatatattagaaactagctatattcttgttggtagagaatagggcaattagttgacctttgttcatataagctttgatagtgggatgtcttggctttgttccttgtagatgatgggttatttcctctccccaggctcacttaaggatgggtgggtggtagtgatcaggaattaaagagtgactagtgttgcctctggtgtagacccacacttttatataaaatcattttcaagttcaaacctctaaaggctgtgtctgatgagggccacttaaggctctgtttcttagaaatcctattgttgatgaaaaggctgtaagaagacctgtccaacttaattcttgatcctagctagtcacttaatgacaatcatgtggcctgtaaatgagataagacatttctttttactcaattaagataaagaagaaacctctttacaggttatatgttaatgcacacacatcttaatacaatcatgtatttctactacatagaaaagcaataagagcccgaacttagaattgtataaggaggtatttgtgtcatatactggactctgaatcatttgtggactacgattttataaacactctaaaaaaatataaaacgtgtcgatgaactactgtgtacctaaagttacattatttttcattaaataaaattctatatacacacactaatattcacagttctcataatagtatggttatattatgttgaaactcgtccttcttaaagattattttgttttgtagacatgtaggaactttcctagaaaatctgtatccagtttttttctgtgccattttgaattagaaactccctaaagaagaataaattaactttgcattttctttcatttttttaggatctgagaatgtgtatgtgtctgaggctacctctgtgtctaaaagcagagcatgcttaaaaccatggctgaggagttatgcttaacggtatactttgcatgcatttgtgatttgaaataggaaaaaaagtcaaatttgagacagcttgaatggcatgctgtcagtttggagcttcatgaattggcaatggtctcatttaggaccttcagatgtgtctctgcctggacagaatgagaacattttgcatgttcagaaggagacagccactccttgctgcttcacaataggcagtggtgcatgacagttgcccttcattgctggcttcttggagcttaacctctgaccctccacttagtcactgtgcagcagttggagcaggttggagatgttggtgaatgacaggcattggcctgcaacatgcttgtcattatttgactgtcaaaaggagcctgccattggtttccatcaaggtttgaaacctctgtgcagcagtccatattacttaacttccaaggctgtcaacaggatgatcaaatgtgcataaaaaaatcagagtgctgaatatatcttcaatcaggagaaagaagtttcccctcttcttttctttctttctttctctctttctctttttatttttcttttggctaaatatattcagatgactttcacagggccaagaggttgaatctgttgctccagtgagaaaagtgaactgttgtctcaagtggtctaagtttcaaatagcacaatttaaatctgagcagctctgctggctaaattctctgacttgtctggcatattctatcagctttcagctgttagtttaagggactagatgctagtccagtggtgcctggtgttagctcacaggataaaacgtttactttggtctctatgtagtgttgcaaagggatgcagacgtctgtgtatgtgactgcgaatgaaagggatgattttggatgtatgattactatctcatttaagactcttttttccacatggtagggttcaaactggaattttaagtgatctgatcaagtcttagaaacttaacaggtcagtcttatgcaatttattttttagacatagaaaaatatgacagcaaaagccattttttttcttgtaaatttgaaactttggtttgaaaagcatcttgaagtggaagaggatgaacctaacagtattctggaagtgtatggaaagtgttggtttgcttctaacattgtgcagtggatggtgtgggagtcacgagacctgagttttagttttgcttctgccattttccagcagtgtcactgtgtgtaagtcactgaaccccttagtctcagttcttcatatggaaaaatagagatactaatatggtgaggatggaaggaggtactgtttgtaaagtacttgcttttgttaagtactgtagtcactcagtaggcattccctgatctcctttttatccttttcttttacatccagtgttagcaggaaagacatcaaacagtagtaaggggccaggtacagtggttcatgcctgtaattccagtgctttggggggctgaggtgggaggatttgaggctggaagttctacaccagcctgggtaacatagtgagaccctgtctctacatgaaattaaaaaattagtcaggtgtggtggtgtgcacctgtagtcctagctacttgggaggctgaggcagggggatcccttgagcccaggagtttgaggttacagtgagctatgatcacgccattgcactccagcctgggcaacagtgctagaccctgtctcttaaaaaaaaaagtcagaagacaatacttgagctgaataaacattccagagcctgacacagtcaatcgttgtgttccaactcttttcttctcccatagttctgattcttgcttatgacatcacgttttagtcaagcactcaaactaccaatctgagtaggctgcctgccttccttttttctccttcccttccttccattcattcattcactcaacagatatttatagagctcctactatgtgccaggccctggtctaagttctaggatacagccatgaactagataggtatcatttggctatcattaggtatctggagagagagacaaaaaataaacaaacaaataatgactttttgatagttctaaatactattaaaaaattagtgtaagaggataaagagttattttggttggtcacagaagagctttcactgtagagttctttccagcagagaactgtttgaaggaaggagagggccctgggaagatggggacagtcttccagacaaaaggggaccatacttcttttttttttttttttgtcagggagtctcgctctgtcacccagactgaagtgcagtggtgtgatcttggcttatagcaacatctgcctcctgggttcaagtgattctcctgcctcagcctccaagtagctgggactacagatgcccaccatcatgactggtttttttttttgtatttttagtagagacagggtttcaccatgttggccaggctggtctcgaactcccgacctcaagtgatccgcccaccttggcctcccaaagtgctaggattacaggtgtgagccactgtgcctggccaggaggctgcacttctgtctcctgctcctcatccagttagtcacctttgtcctaatgtctttccttctttcatctcttcatcttcaggccactgctgtgttcagcccctttagatttccgtaggctcttggcctgtttccattccacccacttctaccttgccatcttaaaaaatgtaaaatgggccaggagccgtggctcatgcctgtaatcctagcactttgggaggccgaggtgggcagatcacaaggtcaggagatggagaccatcctggccaacatggtgaaaccctgtctgtattaaaatacaaaaaattagctgggcttggtggtgcgtgcctgtattctagctactcgggaggcagaggcaggcttgaacctgggaggtggagatctcgccactgcactccagcctgcgtgacagactgagactccgtatcggggggaaaaaaaaagtaaaatgaccgtgtcactccactgttcacaatttcgtggagatttgccactggctgcatgttaaaattcagactcctgggcttgctgtataggttcctgttttttcagccttatttattgtcagctggtaaccacgcccccaacccccagctttcacccccataatttataccttatactcctactgttggaaagtggtgacccctgaacatatgcctctgtccttttctctttctagactcttctcctcccttctcattggcacctagagaatgatgtatctttcaacaatgtccacaaatgccacctcttctgagacttctgtgattctgccatcctcaatgttgtgtacacttccttagctttcccctcactatagctgtttgtccattactttctcagtccctgagctctttgaaggcaagaactgcgcttttattcctctcttgtaattgcaatatctggctgagtgtctggcatacaacaagcactttataaactgtcacctgtgatagcctaatctttagaaatatttagggatagatttatcatggacttcaaatgtagatataatcagattggacagtatacattttgaagagctcttcagtcaaaatattccatgattgatagagagacttctttccttaggcctaatttaaataaatatcatattgaaaggagagtgatgcatgaaaacattagaaactaatagaaatattatatatactaacttcccaagaacaccaggatatagtgtcactgagcaagttagcttcagataaacttttatgttgctttttttttctataatccaacatgtgatgtatcttttttcaaagaagatagtattaaattttgtatttcaattcagtaagtaaatttcatattttttctatccatccatttatctctacatttttccaattatactgtatagcattgtcatgattttttttgtagttttcattattttagaaggcttttttttttgagacagggtctcactctccttgcctaggctgaagtgcagtggcacgatcatggctcactgcagcctcaacttcccaggctcaggtgatcctcccaacacagcctcgtgagtagctgggactacaggtgtgcaccaccatgcccggctaattttttgtatttttagtagagacttggtttcgctattattgcccaggttggtcttgaactcctgggctcaagcgatctgcctgccttggcctcccaaagtgcttggattacaggcatgagccaccgagcccagcctattagaagcaatttaatgccaaaccacagtagatttgtcatatgaatagaataatttatttaaatagtttcctctattgttgaccaattagcttgtttcatttattttatcagcataaataatgctgtgttgagtcagtgggtttaaacatttgtatgtgcatttttaaatgaataaattcctagaaacagaacaacggagttaaagatagggattttttaaggctcttgatgcatattgccaagttgccttatggaaaaggtgtccagatgtttgtagagataggttgtaaaaaggatcctgcattagaatgtgtttcttagattacttgtatgtgaatttgggatctaactgggaattttatatttgagaggacattggagagttcagtaatgggcataaagagaagaaagagatagaaggaaaggaagaacaaaatctagttttgaacttctcaaatggtgtgtaggctgtggtttagtgattttcagactgtgtcctggctacctatagggatctgcttctccaggtgggggcctgagaacagcttagcttctgttgatgtatttgtttatacttttggataaaagttccttcatattaatacttccaaatttgaaaagtttgaaagccacttggtaggtctctatgtttactactatcattttcagacacatgattcaaaagggaattatcttgttcatgcctctgttgtttgagatgtcagcctcctagttcattgttaccttctttttttaaaatttaatttaatttaatttaaattttttgacatggagtctcactctgtagcccaggctggagtgcggtggcatatcggctcactgcaacctccgcctgccgggttcaagtgattctcatgcctcagcctcccgagtagctgggactacaggactacaggcctgcgccaccacgcccaactaatgtttgtactttttttttttttttttgagacggagtctccctcttttgcccaggctggactgcagtggcactatctcggctcactgcaagctcctcctcctgggttcacgccattctcctgcctcagcctcccgagtagctgggactacaggctgtttgtactttttgtagagacagggtttcaccatgttggcccggctggtctcaaactcctaaccttagataaaccgcccacctcggcctcccaaagtgctgggattacaggcgtgagccaccgcgccccagccctcattgtggccttatttttttttttttttttttttttttgagacggagtctcgctctgtcgcccaggctggagtgcagtggtgcgatcccggctcactgcaagctctgcctccgggcttcatgccattctcctgcctcagcctcctgagtagctgggactacaggcgcccgccaccacgcccggctaatttctttttgtatttttagtagagacagggtttcaccatgttagccagcatggtctcgatctcctgacctcgtgatccacctgtgttggcctcccaaagtgctgggattacaagcatgagccaccatgcctggcccattgtggtcttcttaaaggaaccatgttgctaacccgaatgagagaggagtaacctcctgaattaggagttgttactgcactttacaaatatcctgttacctccttcacctctgtatggttaaggaaatgtggtatcaagtcactttccagttcctacttcagtgtgggaactgtgaagtatcttttaggcaaagtagaggttaaggcaccttaagggcaggaacttcttatcttgcttttattagcagtcgtgtcaacatgcactaaaatgtgatgacccactttcccttctgataaaaggagaatgacctgcttggcatggatggagagaggtgcctgaggcagattacattgttaccgctcataataacagtaggcataaaggaggggggtggtggaaaggccagcagatttctgtttacccatggaaatgtttgacgtttttggcttctgatgaaatgtgctaagaagagggggaaaaaggagcattgtagcaggggaaggaatgaatgagtaaggaaaagaaggaatctggcatcagggaaggaatgaatgagtaaggaaaaaagggaatctggtgtcatgtgagacatgtgaagccacgaagggccttaaatcccagccctgtagccatctattggcagagccttaagacctcaaaccatagagggagccccccttttctgtctttttaaatttaacctatatttgtttagagccaagatctctgacatggcttggctgacttttctaaagatgaactgaggccaggcacagtggctcacgcctgttatcccagcactttgggaggccgaggcgggaggatcacctgaggtcaggagttcgagactagcctgccaaacatggcgaaacccctgtctctactaaagatacgaaaaattagccaggtgtggtggtgggtgcctgtaatctcagctactcgggaggttgaggcatgagaatcacttgaacctgagaggcggaggttgcagtgagccgagatcgcacaactgcattccagcctgggtaacaagagcaaaactccgtctccaaaaaaagaaaaaataaaaaagaagaagaagatgagctgaatacagggcgacctgtacagttgataggctctgaggagatatcaacacggaaaattagggacgtaattacccactcctcaatgaaggaggattcttctcagttaagtttatttacttacttggctttgagaccagagtctgataactctgggaaaaagttgtagttattttgagatggtcgatataatttaaggcttttttaagagagtaattgtgtggtttaacctgtcatcttgaaatatgaattatacagagataacattaaaaaaggttatatgtgacatttctaggtgtctcagaaaaagatttgagtttgtctcatgtctaccatggcaacactcttgagttattataaagaacattatataaggatttcctctagaatttttaaatcttaaaatgtaacttactttagccagaataaaaagaggtttaaattaatggaaaactgactggaaggaagatataaaacaagaaacaataacacaacaaaacttcactaaagtacacaattctacaaattatgcacacaagcacacacattttacaaattgagggtatttgtagaaattcaactctcatttgaatcaactcatgacaaaacgtatttacaaagtaagtagaatggaaaagtaccaaaaaagcatttcttgggttaatggtattacccaggtcaaatccattaaggaaattctctgccagaccttttcttttttcttaagacatgaagttttgcacttgttagtataatttgggagtggtcaagaagctaggtgatagaacaacttcagattctggatttctggtctattatttggttttttttatgaataagagattcactcttttctttaaaggaagtaatttagattcctagcactgtcatttctgttctgaatgttataaactctctgtacaaaatttgaaaggaacagacatgctctgatgatgtacagaatcttaatgtttcaaaaacgatagttctcttcccctagaatagaaaagtatagcgttcacctgattgcagatcccaaatgtctacatctgtggttgggtggccaatatcacatgaaagagttttgtgcctttttgctcaatatataagtttgaaaaatgttggctgcaagtaacagaatttccatgtaacagtggattaaacagtaatgacatgacttttcccacatcataagctgtctggaaggaggaagttctcatggaacagtggcttaatgatacagtcaaatgcaggtactttccagttttctgctctgccattcttcagcacgttggctttttcgtcttttgacttgtaacctagtgatcactgggttataacagtgccaggtatcatgtcctcatgtaactgtgttcagggtaggaagaagaggatgggaagataaaagagagtttttatattaggagggaaatccttcctgtaagtcccctagcacactccttattatgtcctattggccagatctggatttgttggtcattcctagttgcaagggagactgggaaaagaagtgtctggcaaaagggaatgcgattcctacgcttggcttagagagctcatgatccattccttggaactgggctcatggctgcccctgttagcagggaagcagaatgaatagctgttgagtaggcagccaatggcttctgccatactcaattaatgtgtgactggaaatgagatttttatcttttgttccacactggccaagggatatggcctctgttaccatgtaatataaccctttgagacaaatacatttaagaccagaattggaactttgaattatccatccaatacatttaattagcactgacagtgttctaggttattgctagacacaggagatactgcagtgaataagatggacagtctctgaactcatagggttgatagtctagtaggactgagagattaggaagtagtttcagtagatatggggaaggcacagtttgctgtgcggtgaatgcaaatcagctaacatggactcggagagtcagggagggcctcttggaggaggctacatcctcgctgactccagagacacaggattcagctaatctcagaaaatgatgagttgatcaccctccttttttaggtattcttggaaatccaagcaaaaacaaatctgctcttaatgtggaaactgtggcaacttgagaattttatgtgcttcacggagtgagtaattccagcagcagctcaggaagcagcatagcagagtgtaaatggcattgtctttgaagcctagttggataagctttctgcctcaatctatctgtgtaaggaacagggtttctctgaaggtatctttgaaatactctaccatcagttcatatttctactttcacctaagtcaatattgaatcctctttggaaatcttggggtcatccttcctttctgtcaccttctatcttcagtcaccaagtctttctgtctgttagcagctctaaaatctgacccttccttctccttcttactgcctctgctttagtttcttactctataaaatggagataatatatcactgtgtagatgccataatacaaatagcaagctcttatggcactaataattttttaatacatgttaaccatatgaataggtcttattattattatgtccattttatggatggagaggttaagtaatgtgttcaaactgctccagctagcagctggtagagttgagggtttgaatataggctgaacatctggctcctgaatctgtcctctgcattgtactgagaaccctgtatcgtaccgaggtacgtcatctgtgttcttctgtactctcctattttgggctaaaccaggtcaaactcctatcttagtgtctttgaaatgctcaaacctgcacgttgtgcacatgtaccctaggacttaaagtataattaaaaaaaaaaaaaaagctccaccatcaatctgtagtttctgccctcacccaagtcaatatcgagttctctctggaaatctcggggtcatccttcctttctgtcacctatcttctgtcactcaccaagtctttcaatctgtcagcagatctgaaatctgacccctccttctcatttccactgcctctgcttaagtttagggtgtctcaaaatacctccttccagcacagttgcaatagtctcagaactaatgttcttgcctctatttttcccttctccccaacatcctctctttttgccaatttctgtttcacattgctgacaagtggtttttcttattatttaactctggtttgactttgattcaatgtaggtcttaaatgtatcccttttggctgtaggataaaaggccaagtgccacaggtttccagagcactatctgacgtaaccagcgtctcctcccagttctgacactttccatctccccgctaccagctccatctatttgctgtgtagtttgtcagggatgctgtcttccatactcattcccctcccccagatttatgtgggggaactcctttttaagatttagctctaaagtttctgcctctgcaaatccttcccttccattgtgcccatttatcacttcagcttctggtcactttgtacttggccattgcgttggtatacttggtgtctctttgatggtgagtccttggaaggcaggaaccctgtgtgcgcctgtttctgcagagcacagtgcagtttctgctaacagagggcctatcataatacttatggaagggttgattgatgtcctgagagtatgtttttaattttgcatggtggacacattttatatatttatctgtgggaaggagattcatgaataagtgtgtatatatctctatatacatacacacatatacaatcatgcattgcttaatgacaaggatacattctgagaaatgcattgttaggcagtttcatcatgtgaacgtcatagagtgcacttacacaaacctagatatggtatagcctattctctactgcatcagtacagttgctgtttcgtacagtaacttgctatacaagtaacttgctatacattactgtactgaatactgtaggcaattgtagcacaatggtaagtatttgtgtatctaaacatataaaaggtgcagtcaaaatacattattgtaatcttatggaagtactgttgtatatgcggtccgttgttgtctgaaataccattctgcaatgcaagactgtgcatatgtggatgtaagaaggatgctccttgtcacccagcagtaatatgagccatcacttattttgcctgtatagtgccctcttgggaaacatgtttattggctcccttagattaactttatgacgagagagtatgtacccttcactctactcctccccccagcctacccaattaaagatgactagtcttttaaaaatagcgttattgagatataacttacatcatataaatggaatcataccgtgtgtggtctttgtgactggcttcttccacttagcatgatgttttcaaggttcatctatgttgtagaatgtataagttctttctttcttttttttcttttttgagacaaggtttcgctctgtcacccaggttagaatgcagttgcacaatcgtagctttttttttttttttttgagatggagttttgctcttgttgcccaggctggagtgcaatggcgtgatctcagctcacagcaacctccgcctcctgggttcaagcgattctgcctcagccttccgggtagctgggattacaagcatgcgccaccacgcccagctaattttgtatttttagtagagacggggtttctccatgttggtcaggctggtctcgaactccccacctcaggtgatctgcccacctcagcttcccaaagtgttgggattacagacatgaatttcttttaactttttatagagatgaggtctggctatgttgcctaggctgttcttgaactcctggtgtcaggcagtcctccctcctcggcctcccaaagtgcacggattacaggcaatactttatttatttttatggctgaataatattccattatatggacacatcccacgttatctcattcattagttgatggacattgggttgtttccactttttggctattatgaaaaacgcttctataaacatttgtaaggaggtttttgtgtggccatatgttttcatttctcttgagcatatacctggaagtggaattgctgggtcatatggtaagtctatgtttggcagtttttgaggaactgccaaactgttttccagagtgacattcccactagaaatgtattagagttccattttctctacacccttgccaacacttgttattgtctatataacaccatgtcacattcccactggcagtgtattagagttccagtttctctacatctttgccaatacttgttattgcctatttaaaaaaaattttttttttgagatagggtctcactctgtcacccaggctggagtgcagtggcaagatcatgattcactggagcctcaacctccggggctcaagcagtctttccacctcagcctcctgagtagctgtaaccacaggtgtgcttttaaaaaattttttgtagagatagggtctccccatatgttgcccaaactggtctcaaactcctgggctcaagtgatcctccagcctcggctgcccaaactgctgggattacaagtgtgagccatcgcaatctggcccttgtctgtctttttaatctttctcatttgattcttataattctattagccaaagaaaaatattcttactattactatttatttatttatttatttgagacggagtctcgctctgtcgcccaggctggagtgcaatggcacgatgtcggctcactgcaagctctgcctcctgggttcacaccattctcctgcttcagcctccccagtagctgggactataggcgcccgccaccacacctggctgttttttttttttttttctatttttagtagagatggggttttaccgtgttagccaggatggtcttgatctcctgaccttgtgatccgcccgccttggcctcccaaagtgctgggattacaggtgtgagccactgtgcctggcctactattactttttagatgaaaaccccaaggcaacagacagattaaatgagatgcctcatatatgtgtgaatggaaagaaagaagtggtgtggataattcaaaaccacagattatccaaaagtaatttaaaagtttttgaatcaaacactaaagtatgtttgatgttggagatcatatttcccactcccacgttaaaagacaattagtatgattgtatcttttttgtctgtgtttttttttaatcattgaggtataattctcctaatataaaatgaaccattttaaagtgtttgaaatgattactctgaggatgcctattttttagtgattgtaatagttatattgtcttcaaaaatatttgcatgtacttaaaaacacttaaaaaatagaagcagtataaagtttgatctcccaaggagccatcatagatctatagagggaacaagaatagaagtaccacgaggcaaactggaagtcacttgttttaaagtaattaagataaccatgttgacttttatccatactttatgtatagccttttcaaaattagaaggctgtgtcttccttgttattctgacatgaatatttagcagtgccatctgtaaccctaggatcatatggtaaatgttaacaagaagcaccagaacttgtgttttccctgtcctattgtttttctacaagaatgctgacagctagagtggctttgtgacattgtgcccacaaagctgaatattacatgtgtagttacctgggtaggtgtagagtgtattttttttaaagagcaggacatagtgactggatgtcatcagttacatctgttttatcgtactaaaaattttacgtatattttgaaaacagttgcaaattagaattttctaacttgtatcttcatgttacgttcctgctaagtgaagaaaatattttctgaaaatatgaaacttgtaatgtgcatacaggattgaaaatgtgctgatagaatattttctggtttttcttgcctttctgctcagtgtgtcataatcttattttttgagggaaaacatgcacattttacagtaggttctccccatctgtttcaattcttcatcttgtaatgcttcctttcaaatagctacatgattaccttccagtttaggggcactgaaaatgttatctctggctcagttgacagtttttattgatgatctggtgggaaccaggtctgtggctttttcagcacatttcaatgtcccaataccacacaagaagcttttctctctcccctgcacaccccagatgaatacaactttactgtatattctaataataaaatacataaccataaattaagacaaggctgaaaggtttaaagaagaaagtaaaagtcaaccttaattttactttccaaacaacataatcactccggacattttggcctgtaacaggggtcagcaaactattgtctgtgggccacatctggcctgccacttgttttttaatcgaccttgagctgagaatggtatttacatttttgaatagttgaaaaacattaaagtaacagtaacattttgtcacatgagaaaattgatatgaaatttaaaattgtttccccaaataaagttttattgaaacatagccatgctcattcatttacatattatctagactgctttcatgctaaaatggcaggtttagtagttagttataggccttcaaagcctgacgtgttcattattactatctggacctttatagaaaaaaaatctgctgacccttggtctatacccttcaagactttttctgtgcatttgcgtgtgtgtgtttacattttgaaacaatgaggttattctatgtgcttttgtaatttaccctttttgctgaatagtgtttacaagtaacttctattgcattgtttgtttattccattggattataatctgtgaaccactctgttgctcttttatttgtattgtacaaacccattagatgttacctaggaacagtaataataatagtagtagtagtagtacttactatatgaattaaaattgattttaattgtttaatgaaataaaactttatttttttcacataatctgaatcatgacctaggtagtggtcaagctgcccaagaaggtcattgaggaaccaggatctttccagtgtcctcttctgccattctcagcatgcaatttcatagagagagggtgactaaactctgttattgttgtgtatcaagttaccacaagtcttagcaatctgaaacgacaaatattaattaccttacaatttctatgggtcatgagtccagatacagcttagctagttgtctctggctcagggtctcacaaagctgttggctgggaaatcgcttatttcaagacttgactggggtggaggggatctgattccaagctcactcatgtaggttttgggaagtgacagacccatactggctgttggctggagaatcaattccttgccacgtttctgtctccatagggcagctcacaacatgtttgttagtttctcccagagtatctggggagagtggggggtaggttacagactttttgtaacctactctgggaagtaatattccataacttctgcggtattctgtttgttagaagtgaatttctaggtccagcctatactgaaggggaggaattccaggagggtgggaatatcaggaggcagggattattgagggtcttcttggaggctgctttactatgtggtttcatttaaatgtggtgggtagaccttcaggcattggcctggcaggaagggtcaataccagcccttccagtttttcaattagaactatgccatatggccacccctagctgcaagaaagtctgggaaggcaagttttttttggtgacacattgttgcccaggtcaaaatcaggattttgttgataagaaaaatttcgataatagacactgggtggacaacagaaggtatctactatccctgccttctaaggtggttataaaggttcagtgaggcaatccagcactggtctggcttataatattcactcagttaaacaggagctatgattattgctgttacttaaaatcacataatatagctttgtaaattagcttgtgacaaaacaggatccctatgtgttgatactaaaagaagtagcataaaaggaagaaaaaaatacattgattgggtgcatagtatgtaccaggcattttatttacatgcagtatctgagttaatcttcatcataaacctaactgggtattgtttgccacactttatagataaagaaaagaaagcccaataagattaactaggttgttgaaggagcgctttccactagtgtgccttgagtgggttatagtttgtggagatattggttcctttagttcttggaatgggcagatggggacaggggtaactggagcccctggtctcttcatctctaactctgggcagcctcttctgattactccagtgtgccttaaaaaatataattttctgcacactccatgatgtggaaaaggttagagtgtataactctatccatgagtaagtgaatccaggtatgtataattccagctgcctgtctcctttccactgtcaggctctcaacaatctatagaagccttgaattttcgttagcctaaaatttgaaatgccccttcatttgctacaaaaatattatatttctacattttcttggattataaagtgatttaagttaacatgatttgaagcttcactgtggtcggaatgaaagcttgcttggccactaggtggctccttttggttctttctcccagtcgatggttgtggctttgtcctgtgccacctcttagaaggaacctaaattggacataaggaagcctagacaacaaggagatctgaaatgaatgggacatgcactctgatgattgcagttaccttttcatcctttactttccactcctgttcctcctgtgctcatacgctgatgtttaggtaacagatctagtccctggagcctcagatgagtctttgatatctctttctcacttataaaagtgggaaagtggggtaaagaacttttgtcctcatctagtatgttaggtaataaaataattgtaacatgtttgcagataattttaggcacaatttttaatacagcttattatcgtgggaatacttgtgttactacgcagataatgattgcactattaatattaatttccctattctttaatttaataatacaagctttaacttacatgtattatctcctataatcctcataggaaccctgcctagttaccatttttttccccctgattttagagatgaggcaattgaagcttagagagataggttaatttgctccaagtttaatagagtttggttgctttcagattttttcctctccgtttggaagttgttaattcattatagttgtgggcagagttttgacttaagtcaatatatttaaaattcctatgaaataattcagtagaaagtacttctggaaccatagtttggttgcaagtacagacatcattttctccagtcgtcttgtagaagtgagcagtagctggaagtgggctcccttcaggaaggctacaggctctttgcagaattacaaattgtatacactcagggatcacttcctttctcttgcctacaaatgcagcacccattatcatagaaactgcagggcatttgacagcttaggttcagactcggagctcatagaatggaacattcttcttcttcaattagagacacactaaaaagatgggaaggcacctaggcctagggttttctttgagactgctgactgatgtgttctcttttacccaaatttagattctgcattaatttccaaatttctctggttgccttgaaaaaataaatcggctcatgctaggttttctttagtcacgaataatttaactgtgcttagtatctctagttgactccccagttgtggtggtgatttctgcagaccataggaaaatgtataacaaatgtgagatgagagagccttgtcaggcagggggcacttactctgggaagtcagagctggcagtgggagcagtccccagcactaacaggtacacccacaagatctgcctcctacactgtcacttctacctctttgttccccttcctgactcacttcctgccagtgatttgtgacatatttcgtagctgatcaaatgagcccctgacacctgattgccgagtgcttcttgtttacagttgctttccaaggacacctagacaagatggaaagcttaacgtgaagtaattaaatttgcatctgctctgtgacaggactctaaggacttttcttccccccccccatatatgaatctcattgtagagctcctaccgtctttgaccatacaacatctaaaaaagggaggatgtggacaggtaaacaaacattggttcagtctactgcctgtcattatcatgataaatattaaataagatcactgatatccctttcttatttggctttctactctttacctacttgttttgccagattggtaactgattttcaacataagaactgtagcttggaggtgatttaaaaagatatttttaaaggaaagcaaatattgccaaacaatctggtttggtttaacaccctttggattgtacatttctcacaaatgcttatgaataattcagcaaagccaaatgcaatctgctggtggtatctagtgttattcacacttgctaatgaataattccctttggcttttatagggcggctctaaggaatgacttctgagactcagatgagttattattgggctatttgtcagtgtccttggggcattgcgagccaaagcccaacttggctacccactccacataccttctgcaattcttctgggaaacatgcagctctctctgtcccagctttttagccccagaacgttgctatgaaagagactctaacagaagaggaaataaaaatgacagaattcagctccactgtgattgcattggttcagttccttcattgtttcattcatataaagaaatgtttattgagcaccttaaaagcattgtatgtccacaaagataagatagatttttatgtgcaatgtcctcaaataaactagaaagtgtagggtgtataggagaggcataggatcccagaggaggatggtcagggtcttttgtcaaagtgatcagttaccattttctcatcatgttctcaggtatgcacttaaatgcatatttgccatttgtggtgttgggtgagggttccgttgctttggataaacctaagatttgactaatcttgaaactgcttaaaggataagccctataatgtgatcccagatatgactaagtggccgttgttcatttctgttgctctgaagtcaggaatgtggtatgacctggctttaccagcctgggcaatctaaggatggtgaacgtggatttatttatgcttgggtggttatatacttataccttagcaatcatactgcataatgtataaccctgaggtcagtgagtgcattcagccttggtgaggttgtttctggcagcctgtatccatttcagttttctctatgcaactcctaagttttcctctagaggagtgtaatcttcctctgagcacactggaagattacagttcccagcttccttgcagttaggtaggatcatgtgattagttctagccaatgacgtggaagtgatgggtattatttcctggtcaagacattaggagctagtgtgccacttgcattctttccctttccctgccacagtgactttgggggccttgtgtttcagatggtggggtctccattgggctgatccaggaaggactgagtggagtagagtccattcccttcccccatcaacatattagacaggtaacttgagcaagacaaagacctttgttgcattaagtccctgagatttgggggtttatttattaccacagtgtagcctggaccattgtcactaatatagagggattagtacaggaatagctgtgtgcttgttattcaacatgatttagccagctttagagaatgtagtttcttttttttaaatcattttttattgtaaattgccaaatcatagttgtaaatattatgggatgcaaagtgatgttataatttatgaaaacaatgtggaataattaacatatatatcaggtcaaatacttaccattcctttgtggttagaacattttaaatgaactcttggtgattttgaaatatataatatgttattatttactatattcatcacactgcagtatatctaaagtagaaaaaacctcccaaacttactcctcctgtctaattgaggctttgtaccttttggccatcatctccccaatcttctaacactcctagccttgggtacccaccattctattctttgcttctttgagttcagttgtttttgattccacatgtaagtgagaatatgcagtatttgtccttctgtacctggcttatttcacttagcataatgttctctcattccatccaatgttgctgcaaatgacaaaatttctttctttttaaaggctgagtggtatttacgggctgtgtatatatgtcacattttctttgtccattcatctgttgatgaacactttggttgattccataagttgaatagtgcatagtgctgcagtgaacatgggagtgcagacatctctttgacataccaatttcaagtatcctgggtaaatatccagaagtgaaattgctggatcatatggtaattctattgttagtttttttgagaactccataattgctgtactgattcacattcccaccaacagattgcaggggttcccttttctcaacatcctcactaaaacttatttttatctctttgacagtagtccttctggctggtgtgaggggatatctcattgtggttttaatttgcatttctttaatgattagtaatgttgagcatttttttcatgtatctggtggccatttgtcttcttttgagaaatgtctattcaggtaccttccccattttttaactgggttattaaatttttaatgtagaggtatttgagtttagatattaatcagatgtatagcttataaatgttttctcccaatctgtaggttgtctcttcacttttttaattgtttcctttcttgtgcagaagctttttattttgatgtaatcccatttgtctattttgcttttgttgcctttgtttttaggggtcagatataaaaataattgctcagacgaatgtcctgtagtttatctactatgttgtcttctagtagttttgtagtttcaggtcttatgtttaagtctgtagtccatttgagttgattttagtatatggtgtgagataagggttcaattttattcttttgcatatggatatccagttttctcaacaccgtttattgaagtgactgtcctttccccaaagtatatacttggcacgtttgtcaaacccacatacatgcatgggttcatttctgggctctattctgttcattggttgatgagcccatttttcactagtaccatgctgttttaattactattgctttgtaatatggttggaaataaggtagtgtgatgcctccagctttgttctttttgtgcatgattatcttggatattcagggttttttcttgtgtgtgtggttccatatgaattttaggattatattttctatttgtatgaaaaatgacattggaatgttgatagggattgaattgaatgtgtagattgctttgggtagtatggacattttaacaatattaattcttctagtctatgacatgggatatcatttacttagttgtatcatcttcagtatctttcattaatgttttattgttttcagtgtataggtcttttacctccttggtattaaatttattcctaagtattattttttcacaactcactcttcatagaactattttttatagctattttatttatttatttatttagagacagagtctttctctgtcacccaggcaggagtgcagtgatgtgatcttggctcactgcagcttccacctcctaggttcaagcaattctcgtgcctcagcctcctgagtagctgggcctacaggtgtgcaccaccatgcctggctaattttttgtatatttagtacagacagggtatcgccatgttggccaggctggtcttgaactcctgacgtcaggtgatccacccaccttggctgggattacaggtgtgagccactgtgcctggcctgtagctattttattttattattttattttatttttttgaaacggattcttgctctgttgcccaggctggagtgcagtggtgcgatttcagcttactgcaacctccgtctcctgagttccagcaattctccagcctcagcctccccagtagctgggactacaggtacatgccaccgtgcccggccaacttttttgtatttttagtagagacgaggtttcaccatgtgggccaggctggtctcaaactcctgacctcaggtgatccacccgcctcggcttcccaaagtgctgggattacaggcatgagccaccgtgcccagccttgtagctattttaaatgggattgttttcttgatttcttttttatatagttcactgttagcatatagaaagactactgatttttgtgtgttgattttgtatcctgcagcttaattgtattcatttattagttctaacagtattttggtggaatttgtagggtttttaatatgtagtgtaagagcatatcatcagcaaacagcaatagttttacttcttcctttcctatttggatgctttttttctctttttcttgcctgattgctctggcaatactctaatactatattccacttctgtactgaatagaagtggcaagagtgggtatctttgtcttattctgaatcttggaggaaaagattttaattctttttttcttttttttttttttgagacgaagtcttcgctctgtggcccacgcgggagtgcagtggcgcaatctcgggtcactgcaagctccgcctcccgggttcatgccattctcctgcctcagcctcccgagtagctgggactacaggcgcccgccatcacgcccggccaatttttttgtatttttagtagagacggggtttcaccgtgttagccaggatggtctcgatctcctgacctcgtgatccgcccgcctcggcctcccaaagtgctgggatcacaagcgtgagccactgcgcccggccaagattttaattctttaccattgagtataatggtagctgtgggcttatgtatggcctttattgtgttgaggcacattccttttatacctaaggtattgagtgtttttatcatgagaggatattgaattctctcaaatgctttttctgcatctaatgagatgaccatctggtttttgtccttcatgtagaatgtaatttcaattgggaatcaaatggcagatctaatttaggggcagaaagagagtttgtttcatcagttatcaaagaatctgtgcaagaaataacattggtgaaaacagagtcatggaagtaaaagaataagtagtaagaagagacagagttgaattgaggctatcataactgatattaatgaattttaaattgcatttggcatgtttaattggtaagattatgaacctgtaatttttctctttgcttataacttatatcaaagtctggcccttgagctaagaatggcttttttctttttctttttcttttcttttcttttttttttgaggcagagtctcactctgtttcccaggctggagtgcagtggtgcgatcttggctcactgcaacctctgcctcccaggttcaagcaattctcctgcctcagcctcctgagtaactgggattacaggtgcacgccaccacacctggcgaattttttgtatttttagtagagatggggttttgccatgttggtcaggctgttctcaaactcctgacctcaggtcatctgccctccttggcctcccaaagtgctgggattacaggcatgagccactgtgctcggccaataatggcttttaaatttttaaaagattataaagaaaaacaaagaagaagaagaatatttaataggggccatatgtggcctgcaaagcctgaaatgttactagttagtcctttacagaagaagtttgctgaccttggtaagtttgcttaccatctctacaaactattatcaaaaaggatcacacttaaccaaaatgtgagttcctggagaattgggaactcattgcttttattaatctctgtgtctttcagtctagcatggtacatggcaacacagtagaagatcacagcaattttacttgattgaattgcacacagaacatgggcaatatggaagacagtttagaggatgaaaaccaaaaacaaattacgaaggttgtaggtctaaagaaatagaactgttcttcctctgtgcttgtgggtggtgacattcctggtttgtttaaacctaagtatggacgtttatttaattttcatattcatcttcaaataaaaggaaggttttaaaacagatgtgtccaatcttttggcttccctgggccacaatggaagaattgtcctgggccacacataaaatacactaacactggtcaggagtggtggctcacacctgtaatcccagcactttgggaggccaaggcgagagatcacttgagctcaggagttcgagaccagcccaggcaacatagtgagaccctctctctattaaaaaaaaatttaccatcctggctaacacggtgaaaccccgtctctactaaaaatacaaaaaattagccgggcgtggtggccggtgcctgtagtcccagctatttgggaggctgaggcaggagaatggcatgaacccgggaggcgaagcttgcagtgagctgagatcatgccactgcactccagcctgggctacagagcgagactccatctcaaaaaaaaaaatttaaaaagaatgaagtattggcacatgctacaccatggactaatgttgaaaacattattctaagtgaaagccagatatggaagactaatattatatggttccatttatataaaatgtctataacaggcaaatctatgaagatgggaagtaggtgagtgattgcccaggggtggggtgagaatcaggagtgagggctgatcggtgcaggggtttctttttggagtgataacaaagttctaaacttagaatatggtgattgttgaacaactctgtggatatactaaaaaccattgaatcatatactataagttggtgaattttatgttacgtgaattacatctcaaagatactaacaaaaataatgatgcagtggattgcctatttcctagtgatgttgctggttatttttctctctgattcaagctgcagtcaggatttgaatcgcttacattttaccttcttgaagtaagatcttctaaaaacaaaattgacttatagtcaaatcctctttgacccagctatgttctacttacatgaatttgctccattttttgtactggcacatgggcacaaagacatatgtataagaatattcattgtggcattatttgtagtggcagaacacgagcaatctaagtatccatcagtagggaacagtttaaatacattaagggagatgaagctagtgaagatgaaactgtcttcaagacaattaaaagaacaaggtgtagaatactgttactatttgtgtaaaatgcttgcatatagacagaatatgttgtaaagattcaacagtggctacctctttgggaggcaaagattgggctgatctagtaataggagagggacagcctattgcagggttgcactttaaaaaaaaattatactttcttttcatggaagcattattcataattaaaaagtggaaccaatgcaaatgtccaccagctgatgaatggataaaccaaatatggtatagccatccagtcacgtaagtagggtcaaaggggatttgaatataaatcaatttcattttgaggaaatcttaattcaaaagggtagtgttcaaatattatctttaaaattaaaaaagttgactcctagactatatctcagcaatcaatcttgcatatctttttgcatacttcttttcaatccatatggaataatttgtcttaagactcatcccttcaattcaccctccaaccactaatgatgcagcaattatgtggttccactgtaattttaacactgtcttctaacccagctgtgtggcagcagtgtatctgcagggcaagaatgtggcttgcaagggtcaatatcacactgcccacaattattttaatgtctcctctgaaatgataaatgaactttatagttataataaaaagtaaacccattccccctaaggtataaagggtgtacaatttacatagtcagatatgactgcctttttttttttttttaaagaatccttcgttgagggctttaaaaaaaaacagggttagggataggaataggtggctcatgcctgtagttccagcactttgggaggctgaggcaagtggatcacttgagcccaggagtttgagaccagcctgggcaacatggtgaaaccttgtctctacaaaatatttgctgtgcatgatggcgtgcacatgtagtcccagctactcaggaggctgaggtgggaggatcacctgagcctagggagttgaggttgcagtgagccgtgatcgcatcactgcattccagcatgggcaacagagagagaccctgtctcaaaaaaaaaaaaaaaacaaaacaaaacaaaatgcaaaaccagaaaaaccagggatgggttttcagtgtgggcatttatttgatccagcccaataaacatgattaaaatatgaaaatgttataggatttatagctgctcctctaggaacttacactttttttttttttgctgttgttggcataattggaagaaattcttccaagttttgcatctgcattgcttgtcttataacactaacttcatgtaacttacaaaatatttgctggaagttttcctggccctaggaggacccataatttataactcctgctttttattatttggtgccacttgtggctcgtgtccttcctaattattgcaaatcctctagcctgcccccacattcactcagtaagactgccaccttgagacatgagctgttggtgtttgcagtatttaacatagcatctactaccatcatttagctatctctgacaaagagctcattgggccctcttgcaccatttcctcagctgggaagtgtgggattgtagaagctgcttcccttctccccacatctgaagctttgtcctatcacatgaagctaggatttccacgctttctttctagctgcaggagaactggctgctcaggggtgctgcgttttctaccttctgacccacagccagaggcagctcccactgcactttttcatttgcattagatggcactttgctttatacaattgacgtctccatttaatttttatatcttgcctgtatcgttagagaacggggtttggaggtgttcatgacttatagaagccccacagttagcccttttatgatccctcttttagctaggccctatttacaaattttgtaaatttagatggcttcttattaaatgatgtaaacccatccatttgtactgttaaagctgtcatgaatggtatggcatttttgagtcaggccgtcctatagcacagctgaagcacactgaggcccagagagtttattggcttcttcaagattacaaagctacttaattacagagctgaatttggaatttagaattccaggtccagaactttttccataaactgaactgaagtaaaagctccaggctgggcgcggtggctcacgcctgtaatcccagcactttgggaggctaaggtgggtggattacttgagcttaggagttcaagatcagtctggccaacctggcgaaaccccatctctactaaaaatgcaaaaattggccgggcacggtggcggatgcctataatcccagctattcgggaggctgagtcaggagaatcacttgaacccggaaggtggcagttgcagtgagctgagatcgcaccactgcactccagcctggatgacagagcgagacttcgtctcaaaaaaaaaagctccatgataccttgaatttaagggaaaattaatggtgagttaggaaaggcatgatacacaatgcaccaaacaacactccatgaaaatacctcaacaacgaagtactttggaaagagatgacgctgaggtatttaaaattttatttactttcatgattatccaagaagtaacaaatctttttttagattatttctgatagtctttacatgttcttccaggtacttctgtagcaacttaacagatcgtatgacaatatgctgatagtgattcttccttttgataacggtattagagaagacagacagtgctaggacaactgtacaaacaccatttctcatcgctataggcaagccagaagccacatgtttcctagggaaaagggctgacctgttaccattgctagttgtgtgtaaaacatgtgttagaagaagtaattatgtttagctgactgactatgaccaagattaatagctcttgaaagggctgtaatgaaaggctgccccaactggcttccacattattctttatttatcccgctctcatccctgtcacctttgggcaccagccaaatgtcatttatgtgagatttgccccttggatgtgaaaggcctctctttcttaatgatgggaggcgattgggctgcagggctggagagcttggacggttgacatgacccagaggagatgctccaggtctgtgggagtcagaggcctaggactctccctcctgagggagaaagaacatgaggatattcagctgtctgatcccgtccattgaggtgtacttgagggattacagggagtacttcaaacactctgttgtcaagtccatatatttcggtggctcttcagtttggagcacttggaagtttcttattttgaagaccatttgtttgaatgaaatcatcaatcatttctagtttcgtaaaacttggaagtctccttgtggtagagactgcacagatcccttcttgcttctttgagtcatggacttttcaggctggactgctgcccaaaatgcagattgcatttccccagcctcccctgcaacggggtgtggccatgtgactgagagaaggtgtactatgggagtctctgaggtgtttctttaagagaaagctggtgtatgccctttgccctttgcttcttaggcccttgcttctgtcccgctgcctggaatgtacatgctggacttggatcttgaaggtgaagcccaagccttatgggctaaaaggggccgggcctctgagaacttcaggagaaccactgtcccagcctggttaagccactgttattttggattttttgtcacttgtaggcaaatctaaacttagataatacactgtttctacacttgcagaagatgaaaacgccaaacccttggattgccttttcccttcctaagtattaatatcaaaacttaaacaggttcctttccccttctttcaactcctctaaattaaaacaacctacaaaaagatcatgcagtaatttatttaaaaactaaagacatgagagagatctcagtaagagagatatatgagagggagattaacaagaaggctagaaaggaaaataacacatttaggaaaatgataacgaggactggtcttcatggccttctgtaataggtcagggagctctcactcccttccagtgttggtggcagcaacagcttcttttcttagattattagaggccctagggattcgatttcacctgctttgttaaggccataggaagctttttaaaatttcagatttcaaatgtcaagtctctattcagtgcttttgggccccttgcatcagagtgtttatattttgcctgactctttggtttccggccataaagtttgcatgttgtcatcttttctctaacattatgtgtattagataacatgtactacaatagctatagtgggttacaaaagattcttaacacaacccttttaaaagagttgcagagatgcgtaattatttttcatgattttcaaaacttttgaaagagaaaagcagctgtttggttcactgttctcattagcatttatatagtaaactaagagagaggttttctgtgcagtgtttttccttgctgtttcttgccttttaatttgaagaatagcaggatcttgtcttttgttcacatgagtagaagtccattcagctggaaaaagaacagtgcactctttgtgtactcagagcatttgaatgcttttggtcacacactagttgctgtttaactacaataaaattgtgaccaaaggagataaacatttaaaggataaatgacaggcctgttaatctgaaagcaagttttgtagcgttgttgtttttagctaataggtgtatagccaggagtcacggtgatgacttttaaatctgaaactgagtgaagtctgtgttttcaaccagtttaaaaaatgttgccactggacctttttaaaaaaatatttttaaaaatacgacaaaaattttatgtatttatggtatatactatgatattttgacatgtatacattgtagaatggctagatcaacctaattaacatatgcattatctcacatacttttttgtggtgagaacacttaaaatctactttcttagcaattttcaagtatataatacattgttattaactgtagtcaccatgttgtacaagagatctcttgaacatcactgaacatatttatggctgatcattttgtgttttaacaatcatttgaacatgtctaaactgtctttagaaactggtagggatttccttgctgtgtttgctaagcttggccatgtcatccacataaatatctgaatatattcatatatgaatacatactgtatataatatgtgtgtatatatgaatacataatacctatatttatatataatatgtgtgtatatatgaatacataatacctatatttatatatataatatgtgcatatataaaatgcccaagtatattatctaagaaaagagccactggggcttttataagtctatgatttcagaactatgtccatctttacacctctaaagcgttatgatttacctgatttggtggaggaaaggtatttttggtaattttctgtccctatgggaattcaaaggataaatttcaatctctttttctttctttctctctctgtccatcttatgcagctgaaaactggcatatgactctttgagaagagctcaaacagttgtggtaagggtgcttagatgttgagtgctatctgttttctggggtgtgaaacatacagggttttaccagtctgttgttgcagagtgctgggtgtattttgctttagctgactgttccgttggagtattcagcctttctttaggataacaaaaaataaaattaatcaaaggcataatcaaggacgttttccttttgtacagtcacatctcattatacaacattagtcttaagctttgcccacctgccagataggtgtaagatgattaatgaaagctgaaactctcagtctagaggagacagcagggactggtggtgctagtggtgaagtaagaagtacatatgctgcctaaagggactctggttcagtgtgtgaatgtcagcccagtgttgcaaatattctgacttttcaaaagaagcaggacatctagatttttatttgaaatctctttattttaataagccatcgactaattgaaatttaaaacctgtgtagtccaaatagaccatatctacaggctggaaggaatagagggcctgccttttgtgacctctgttgtttggggaggttatgtaaccattgtaaccagggaaggatacatgaggattcctcttcagggaagctgaccagcccaataaaaaatatataggttgacatttggagatatcttaaaagacggccaggtttccatcatatcgctctgtagtgaggcccaccagttgacaaactaagcttctgcacattcagcttctgatctgtttcatattccctcactggaaattatgaactgatgggcaaagatcattgaacatccaggaatgcctcaaataggaatgacaaaatacagagcacagaaacagaagaaaaggaacccagaggaacaggaaaatgtggagagcagaaaacaatttcaaaacaaattataattaatattcccagagagatgagagaaaatacacgaaacaggaacaagatgctaataaaaaggaaccttcacactgttaattttgttagttgtgataatgtattgttatacatttttaaaaatcttatacatttaaaaaaaagttgtccttagttattagagatttatgctaaataattacaatttgaatattgtgatgtctgggatgtgatttgaaataattcagaaaaaaggatagagtcgtgtgggagatagataaaatgagattggcaaaatgttggtaattgttgaagcatgctgcgtaatgggcgcataggggttcattatattattatttgtacttttgtgtgtttgaaattttccattatacaaccttaaagaaaggatcatttagaaagcaagaaagagcttgcaaattgaaaatatgatagcagaaattaaattttcaacagaagtattagaaaatacagttgaagacatttgtccagaaattagcccaaaacaaagcaatggaaaataagaaaggaaaaatatgaaattagaggatcagtccaggtggtccagtatttaactctgggagttacagaatgagaaccaaaatatcagaaggaaagagattatcaaagaaataatacaggctgggcacagtggctcatgcctgtaatcccagcactttgggaggcccaggcaggaggatcagctgaggtcaagagttcgagaccagcctggccaacatggcaaaaccccatctctattaaaagtacaaaaattagctgggcatggtggtgggcacctgtaatcccagctgcttgggaggctgaggcaggagaatcacttgaacccaggaggtggaggctgcagtgagccgagatcgtgccactgcactccagcctgggtgaccgaaaaagactccttctcaaaaaaaaaaaaaaaaaaaaaaagaaaaaagaaataatacagggtcatttccttgacctaaaagacatgagtttccagatcaaaagagcccagtgaccgcccagcacaacagatgaaaaatgatcccactatggcattttatcatgaaatttcctaaccccagaggaaaagagaagattctaagagctctcatttgcatcctgagctggtctaggatccagggtttccttgggccaatgcttcagatagttaaactcatcttttgcttggtcagggatgtggtggttgcctggctgttgggattgagagaaagaatctagggtctaacctctgctcttgacttccaactagtcttcctgttttcagcttcatggttgaaatgcaccttccttcagaagttcctggttattgtattcctgagcctttctgtagatggtggcatgggagctcacttcttattggtcttccccttttctccctcaatcctgtctaccagttagtcttcagctttggtgtgtgtgtgtgtgtgtgtgtgtgtgtgtgtgtgtgtgtgtgtgtgtgtgtgtgttttttggagacagggtctcactttgtcacccaggctggtgcagtggtgcgatcttgggtcactgcagccttgacctctgaggttcaaaatcctcctgcctcagcctcccaaatagctgggactacaggtatgtaccaccatgcccagctgatttttgtattttttgtagggatggggttttgccatgttgcccaggttggtctcaaactcctggactcaagccgtctgcccgcactggcctcccaaagtactgggattacaggcgtgagccaccacacctggctttaggattcaggttttgctgttacattacttgccattcctttttcatcttttaacatctctcatctgcttgctttcttttttttttttttttttttcctgagactgagtctggctctgttgcccagactggagtgtagtggcatgatctcagctcactgcaacctccgcctcccaggttcaagcgattctcctgcctcagcctcccaaatagctaggattacaggtatgcaccgctatgcccagctagtttttgtatttttagtagagacagggtttcaccatgttggccaggctggtctgaaactcctgacctcaagtgatccacctgccttggcctcccaaagtgctgggattacaggcgtgagccactgcgcctcatctgctcttatctttcacattgactttgacgatttatttttattgttgttattgttgtctccttttcttttttcttttcttttctttcctttctttccctttccctttccttctcccttcctccctccctcccttcctttcttccttcctcggttccttttcttccttttctttcttttctttttttctggagacagggtcttgctctgttgcccagtctggtgtgcagtggcacaatcatagctcactgcagcataaaactcctgggctgaagggatcctcctgcctcagcttcccaagtaactgggacatcaggcgcacaccaccacacccagctcattttttttttttcagttttgtagagatggcaccttattatgtttcccaggcttgtttccaactcctgggctcaagagattctcccaccttggcctcccaaagtgctgggattgcaggtgtgaaccactgcacccagtatattgttttaatttctttacaggcgttccagtgaggttttgggaaggagccaagtgcatgttttgaatccaccatgttagaatggaagttaatttgttgtgttaatcattaatttgtatgtcagagtttcttttcctgaggtttatttgaaaatcaacgtaagaaaacaaaatttaatatggagaaaataatttcctccttcttaaagtctcctttgactatcctcacggaaattggtttgtttctactttctctgaaatactgtggccctgggagactcctgctcagtttagcaaagaattctctactgttttgggtcttaatctaagcactggatgtgtgcttttcacccaactagattatggagtctctgtgaacctagggagatatcttagtctgctcattgattaccttacggctccttatggatatgaattgaataaatactttgctgatcaaagtatactactcaaatttgtattactttatttttatatgtgttatatgtgattcttttaatgccttctcagcctgttgctcagagattagtgggaaggaataaatgtaacaagtagactttgggggtaatactgataagttaaaaatgtcattggtttatagcttcaagggtattttactgaaattgcaaatgttctattatatttagaaagagaaggaatggaaacctgactagtcattatactgaggttgggaaatctggaacttgagttctgaatcagttttctgtagatagcctgtttcacagtggatttgcttaatgttttaccggtaaacaggcactcctgtttattttcagctcttgcctttcagcacaggatagctacaattgttcagagtatgcctctcttgtataaataacaatactgtcattttctctaaagtcatcctttttattaaagaaaccctttaatagtcccacatattctgtagttatgcatttctgtgagtgcttactgaccccagcacagtgtttaataaattattgaactttgaagaacctttgagaagcaagggctttatgtgactgagcagcagacatgaaaaaacgttatcctccagagtatctaacagacagaaatagaggcttgatcagacaatataagcaccgagtgaatgatggtaataccatgaaatatttacacccatagagcatgcgagggtggggaggagagtgtgggtttttatccttttgggttgaacctgatgccatacaactcaccactctatgatcttaaaagcaaaacagaaagagaatgagagaaagaaaggaagaaaggaaaaggaaaataaagaaatgatgaatattgatttggtgatattttgttgtttgcattatcttatcacaaaagcaaggctccttttgtagacaggaaccttactaagagtcaagttttaatcagtccttaacagaaactgaagatatctgaagtgatttcttgccactacaagtttaaagttttaatttaatcaatatctcatgatttaccatgcctcaaaagctgtcattttattatctgtaataaatagagatttgaagagtaaagaactgaatatagcctgatacgatcttacttttaaacagaagatgcaatttatttattttttcatgggatgctattttaaagtgacttgtgatttctttaataatgatccacagagaaaattaacataaaggaagaagtgtctaattatttaggaaaggtttggaagatgtttatcccggctaatatagatagagagtgtctaatatcttacagcatagaaaggggctaaaacaaatgtgccaaccaatttgttttgcccctgtgcccagtattttatatatccatttttttaaataaggatgaaccttttaagatttcatggtgtcatctaacattattaaaagtaattattgttgatgataaataaaggttgacaatgatgtgctttattgaatttaattttactcgtggtttattttaaaaacccgcagattgtgtttgggagatattttaatgtagtatgtctgttttttgctttctagttgtggaagaaagaatcaaattatgtattaataaggaggctcagattgaccatagacattggcctttcaaggggatcatctggttttagaggctttagtctcctttgagtaccctggatgtttgctatgtattatgctaaactaacgcatgattacattgaccctatgattatagtgacctaaattggcaagtttctgtcacttataaagtcaaggtagtaatgttggaagggaaactgtagtgagactctcctttgcaactgtaatgttttgtctgtagattgcaaatgagggaattttataaaggctttattatttgtaatgtaggaacccattgcatacaaagaaatttttagtctaaggacccagtattagtgaaatgtgacatagatctatttgtgaaagggtgtacccagttgaaacagcaggggcaagattttatttgtatgtttattatttttgttaccaaagcgatgccctggaaagaatcgggatttttgagtgagtgatgtgatgtggatttaaatcctgtctttgccacttagttctttcacttccagcaagtcctgaacctaagactcaattttttctctcaaaatggggctcatgatgatttacttcgcagatttgttaaagcttgtaagcattcagcacggcacccagagtgtgggaggcactcaatgaatattagctcctttctccttccttttcagctaaaccaaaaaggctttatctaggaggtgagacttgtagaaactcttgattgatggaaggaatgagtcagtgaactagaagaagggtattcgaggcctgtggataaccatgtgagaaggtgagaagtgagtgtgtagtgatgggagagtgtggctggacagatggacagataaagaaaagagggtgtggctgggcgcggtggctcatgcctgtaatcccagcactttgggaggccgaggcgggcggatcactaggtcaggagatcaaaaccatcctggctaacatggtgaaaccccatctctactaaaaatacaaaaaaaaaaaaaaaagaaaagaggggctgaattaactgacttgtagaggcaaatgtgatattggtgttgggacacatcatctgaacttccactgtcattatctgcttctcaaaattggagttgagagcatgtgcgaacttgagaatttattcttcttgtctacttgaacatctctcttttaaaaaatgcaaaatgttagaaatgtttgatccaatatagggcaaataaaaattggtctgttctttttttttaaatttttttttgagacacagtttcactgtagcccaggctggagtacagtggcatgatcttggttcactgcaacctctgcctccagggttcaagcaattcttgtgcctcagcctcccgaatagctgggattacaggcgcatgtcaccatgcctggctaatttttgtatttttagtagagacagggtttcaccatgttggccaggctggtctcgatttcctgacctcaaatgatctgcccgcttcggcctcccaaagtgctgggattacaggcatgagccaccatgcccaacctgtctgttgttaaattctacctctgatcgtaatacttcgatggagaatacattgctattacttttagcatgatgggtaccaatatgagatttccagttgcttcccgcatgttcattttgcagattttaactgaggcttatatatgctcagggctgtactgtactctggggattcagtagtaacagacgagagtccctcttctcatggagattaatattctattagaggaagaatgctagtaaataagtaaacagtggctgggcatggtggctcatgcctgtaatcctagcactttggaaggccaaggcaggtggatcacctgaggtcaggagttcgagaccagcctgggcaatatggtgaaacccggtctactaaaaatacaaaaattagctgggggtggtggcaggtgcctgtaatcccagctactcgggaggctgaagcaggagaatcgcttgatcctgggaggcagaggttgcagtgagccgagagatcacgccattgcactccagcctgggcaacaagagcgaaactccgtctcaaaaaaaaaaaaaaagaaagtaaacatatttaaggtcgtaaataaggccatgtctaatagtgataaacagtatgttgtgttaatgactgaggggaggggactgctttagatacagtggtctgaggtcacctttgatgtgaactccaaaggatgacaagggcatacatttcagcctcagagacaaagctctgaggtgctaaagagcttagcatgtagaaggaacagaggtggtcagtggccagaacttaaagagaaggaaacgaaagggcaaaggaatgaggccagatcatgagggtagggactttagactgcggtagatttcgattttattccaagtcccattggaaatcactggagtgttttaaggtagggagcgtgtgtgtggagtgacttactctgatttgatttctataaagatcactgtggctctgcgtgaggaatattggaaggccagagtagaattagggagaaatattgggaaaggaatgttctgatggcttggcccagttggtgactgtgcagatagactgaaggggaaggatttaagatacattttgtaggcaaagctgccaggatttacttttagacagcataagaagtttgaaagaaaagaacaatcaaggaaaatttccaggcttttagcttgagtaactagattggttttgtttgcttgttgtttctttttggagatggggtctcactctgttgcccaggccggagtgcagtggcgcgatcgtggctcactgcagccttgacctcccaggcttcagcgatcctctcaccttagtctcctgagtagctgtgactacaggcgtacatcactactcctggctaattttttcgttatccgtgaagatgcctcactgcattgcccaggctggtctccaactcctgggctcaagtgatttacccatttcagtgctccaaagtgctgggattacaggtgtgagcctctgccctggcctgagcaactagattgtgaccatttactgagataagaaaactgaggacgaagcaggtctggggtgaatcaggtgctatccctttggacagtcacatgactggtgtctgttcagcacccaagggaccatcaaagaggctgttgtggagagggaatccgaaggtcagggccagagatagaaatctggggagtcatccactatataggtgatgggttaaagccttagaactcttcttttcatgaatcattgttgttctttaggttgtaatgaagttttaggcctcagcttccctgaactggagtgtttttccttcaccttttccggtctctgggttgcatcgccagactgtctctaagcccaacaaacgcgttccttccaggcaaaagcaggagatgacacacaccatgagccagattttccatggcagacttgtaaggaacaagataatctcattgttcctcctgctacttaaaataaaggtaatattgattttatagtagcagttcaggtcctaaggcatgatattgattaagtgtctgatgagaatttgtagggtagtctcccagacctgcagctacagggcatctccccactgggccaggcctctgtgctgacctccactgttataagtggtgtttttcttaggaatccttagccctgtttagtctacgcactgtccagaagcatttatttaacctgatggatggctcaatccaacccatcaccttaatctgaccttaaagatgggaacctaatgtttttgttcttagtaaatgtgaagactaattttgacactgtttagaattattttcttattagtagcagtagatttcatgaattttctgctgtgaaatttcctattaaaatactataatctaatgttaaatgacgagttaatgggtgcagcacaccagcatggcacatgtatacatatgtaactaacctgcacgttgtgcacatgtaccctaaaacttaaagtataataaaaaaaataaaaaataaataaaatactataatctgacttttttatttttacttttttactttggagcctggctttatgaattttttttttaaacaggggaaggtacctcttttcaaggtgtcattattaagcccatgggactcttcaattttaatgttatatcaaagagagtaaatttcttgtgattattgtgatatgatgcattcaacttgcaggtcaggttttatatcatttatagatcagattctgaagatatcttcagtcaaatttaataacaatcaaggaatatattattcaccggcctgaagtatagaaagagttcccagaaatcatctaaaaataactgtttcatataaaacattttgactttctattgtaataagattaatatatttttctcccatgtctaattctggctggattgttcatggggttgatgtgaggattcagtgagttaatataggctaaggtgcataatataatgcctgacacatagtagatgctcaatttatgttaactactgttagctgctttagcctgttgttaactgcaaactccttttacattacctagcacaggcctgggcacaagtatgatatttaagtagatgcttagtgactgattgatgtctccaaacatttgggatttccttccacatttgccatagcacagcttgttttatgtcttttctaaaatggtctaggtacctgacatcctttgatccttcatatggttacactcaaaaggagccatatgaattttgaccatttgcacatctgcctgtctttttggttagctgccagatagagctcaggttttaaatcctttgcagttaaaagagataataaatgttaacattcctagtacagtgcctggcacagaatgtgtaaatatcatttgattcggaaacatgactgctggtcaattcggcctccagggagacaaaactaaggggtggggttgtggctttttttgaggtaggggatggaatagatatttcttacccgagtagaagatgatgccgggggatctaatgcttcttttaaatttcccttttgatgcacaaaggggcaactccgtgtagcaggaccttggtgggatggataggcagctttgtaagtggagaaatggcctctgtttagcttatgagcacagagtcattttgggggtggtttatgagtcatctgaaatatgcatttaatctagatttgtggcctgcttggtgaggctgctgcttttttatgatctcaagtgtcttgtccatgtcaaaacttgccttgtttttttgtttactttgaatcagaaaaatgttcacaaccacccttggaattcctcctcaagtgtgcgtttggtcacatcacccctggctaccaccagtacatgactgtttattttggatgtccttttctgatgttcagctaatttaacccacaatgaagttaatccttgcttctttggaaaagtacagatttacttattagctgccttccagagacatttgcattttcatgaaagcgagtatataattacattgacttttggactcatctacccacatatgtggtgggcgccttttgaaagtcaggattcagagtaaatcagaactgtcttgagttagctgaagttctctttaaggttaacaataaatgtatctatgacaaacatggggatgtggtattgcatattcgattatgtccatttatctttccttcttctgggtgagaggggagatgaaaatggagctaccttggagttcatgttttcaccttgattctccgcatttatagcatactgattgaaagcatggctgccagaaccatattacttgggcttgagtactagctctgtcacttactcattgtttaactttgggcggggtacttaatttctctgtacctcagtttcataatctgtcaagtggggataattatggtaaccaccactgagcattgttatgaagatcaaataagttaattcatgtaaaatatttagagcagaacttagtatatagcaactgcgatacaagtgttagatatcatttttattagggtttagtaattgcataaataaaagagatgaaagtctaaattattaatcagggccatttatctatgagacactacaggcattgtgtctagccctgtgggtttacattagttagggtaggttattgctgcaacgtaccctaacttgatatgatttttgctgcaaaaatcatatcaaaatagtctataatggcttaaacataataaaatgcatttcttgtttatgtaacagtaatgagtaggtaaacagggtggtaggacattttcctctctgtattcatttagggatctaagctgaaggaggctctgccatcttccacacaaggtttctaaggtcaccttaggttatctctattccagccagcaagaaggggaaaagagctgcagaaatgtgtttaggggttttttatgggccagacctggaagtggcactcatcacttctgttcacattccattggccagaactcagcaggaagaggaggaaaacagctgccactcatctcagccacagagtttttcaggggtctctaaaaatgtatgagacttgaaaaaaatgtattgactccaaactccagacataaaattgcagaattgaaatgaataaatgtttaactaaatgcttataaaatggagccttatatcagcttccaaagttgttacagtttgtatggaaaaaaatgtaatttcttcctaacgaacctccttgcttctttccctgccttctctactatatttgaaaagattttgtaagttggaatttggaatttccaagaattcccaagtactatccagtgattgctgagaaattataattagtcataaatgagtttctcaaggccaaataaattcaaacgaaaaatcttctcaaattattttgcattgcagagaaaccttttaatgtgaaatatgaatacaatttaatatgtttattttgatgttgagtgaggccttcaaaagtagcaggatcatggcctacagaggtcttaacattcctattgtatgcagacacatttcaattgctttgaaaaggtgtatgttgaaggtaactaaacacattttgcatttcaagctcagaaaatttcccctttagattcccttttcttttctccttttattttctaataaaatatttactgctgtgatatccaagaacatgaatgatactgcattgaataacccaggtgcttggtctggtggatgccagtgccagagaagaaaagtgccctattttttcagttatcatgtttgaaggcgaggctttggtctgccttctgagtcattcttggcttcttggatgatagatttcttaaattcttctattctcctaactcaaggcacttctgaatgggtgtttgcgagacgttgtttgaaaaaccacttatcgtgatggatttttgttcttctattttttgctctcttacacactttgctgttgtcctgccaattggaatttgatttgttaattacaaaagcaaactatccaggatggctctaaagggacttcgctataggttggggctatgatagagactttcgcgaaagggattggcaattaagaaatatagcaactgcttctgatgattaaacatttcaagcaactctgaaggtagaatgtggggaatctccagagaaggaaggaaatagagagggaactaatatttatagttactcctatagtcatctccatctcagtacaggacatcttcatccttccagttgttcagaccaaaaaccctggaaacatccttgacttcgtctttcccattccacatttcacccatcagcaaattctgttgcatctgtcttcagaatatattcagaatccaaccacttcttacaacgtctccttctgccatccttctccaagccactagcatcactctcctggatcatcgcaatttcttcctatctagtctccttgcttctttccttgcctttccctacatagcaatcaaagtttagtcttcaaaacacaacaaaacaaatctcttttctgttcaaactcttttatgtttcctcaaaatgttatacgtagagttaccatataacccggcaattccactcctagttacccaagagaaatgacaatgtatgtccacacaaaacctgtacatgaatgttcacagcagcgttattcatgatagccaaaagtggaaaaaacccaaacgcccatcaatgatgaatgtacaattaaaatgtggcataaccatacaatggaatattatttgtcaataaaaagaatgaagtactggtaccatgctataaaatggttgaactttgaaaccatatgctccgtaaaagaagccagtgacaaaaggccacatattacatgattccatgtacagaatagacaaatccatagagactggaaatagattagtgattgccaggagctggggagagaggaatggggagtgactgctaatggatgcagggtttctttttcttttgtggtagtgaaaatgttctgaaattaagtagtggtgacgattgcataactctatgaatatactttctggcttgtatacttttttgaaggggaaaattgtgtggtatgttaacgatatctcaataaagctgctattacaacaaaaacaacttctttggctttctttctgatctttttccctgaatcgtttctgacctcttcccctactcttcttctctttctttttaacccactcagactggcccctattttgttcctctaacagggcaagtgcttcctgccatgggcctttgtattttctcttctctctttttgtagaactttcttcccccaggtatctgcgtggctggttcacttgcttcctttagctctctatttaaacatcctattctcaggagactttctctgattacccgaaaatagtactccctacttcatggcctgctggcgttctctgtttctttcatcctgttttatttttctctgtatcatcaacatgtgatacactgttttcttgtttgttttttatctgtcttccaacattaaaatgtaaactccatgaggcagtaactaggctttgtttgtgactgtatctgcagtaatacataccacacctcttttcactagaccattagcttgaggaagacatggatttccttggcactggtgttgaattgggactaactgtatttgcaggaggaatattcagtgtgtctattagatgctacattagaaatcatcagcttggaagcagtctccatgggaaaagtaattttgattcaaagggtagaatggaactactcaggttacatggtcttttattgtcatataaatctttgtacagagttcctactttttaaaccattagcattatgctaatatacaaagtttgctacttttcatatttgtcttacagattcaaagcctttagttcttttcagtcttaatttaccacctgtctgctctctccttttctcccttggaatgttcttaagatttaattttgaaggaactttctgtcagatgattattggtaaagtaaaatgtatttctgggaagcagctgattacttgggcctttgatttatttatttatttttttttttgaggagttcatattgcgatatacctatttggtggttatttagaaaggccaaggtagggagaaaaaggaaagaataaaatatatgtatgctttaaaaaaaagcaagcatttagtttggggagccctccaaatgtgatttcttctactcctgttttcctgcttccaagcataggtggaagatattgtcagtttctctgaactcctaagttgaaatgtgcaagtcactaggtggcactgaagtatcattctccacacagccacgccatagaacacttttgttatcttgctccagctgactggatttctaggtgtcagggaaattgttttattggtacagggcatagtgtaatatattcctctccaccctaggcagctacttaacgccctgaaacatgcacctcttgtggtcatggcctgttaactatgcttatttggtgtaataattagcagaatttctcactaacaggggtacttaccaacacctcacatcttcactgtgtttttgtacgtgatggattgtacattctgtggagaaagttgggaaggtcaaagcttaacctctgcctaacaggactagttttcgcacatttgttcagaataggtttatattaactggcttttgagcttcttcagaccagaattgtgtgtaacgtaaacatatttgagcttttatgtaaggacctagtgaaggtttgtaaacacaacactgttaattttccaactcatagaatgacagaaaaataaatgaatagctgctggaataattggacgacacttgttactcagaactgtgagtgttggaagcgtgtcataggaacagtgggcctgccacaagcaccacattttaggttaaaatcggagaagaaaattacacatggaattttaattttttccatggtcgtaagttcggccccatttaattctttgtggtttttacaagccctcttaggctcctaatatttctatagcaacaatttcaacgtttattttagaatgtggtcagaattaaccgacagaagaccaaacaggataaaataggtttaaagcaggaaatactttagctggaccactaacttaccctctatgaccttaggcaaactgtttgccgtctctgtgctttgattctctcatttcttaaaatggagattataatacgcacccttgtgtgtctcctccaccaggtaaaagtgaaacaataacttctcaatatacctttgcttatattcaaagctccaggtaaatataagatgttgctataattacctaagaaagctaggaagatttttctttgttgattccaaggtgagttgtagaaattccagaagatggattaatgtagtctgagggctcagacttctgcatctgtgtagatagtacctattttcatatactgtggcctggctctgtttctggcctggctctgtttccaaggtttaagttccattcttttaactgtgtatcaactattttcacttggttgttctacttttacttaaaccctttatatatgtctggatttagttgtaggaaacagaaactatgtgagatagggaaataggttgatataaagtcatcaggaggaccagagaaatgggctgaaggtggagcctccagagatgggcttctgaaacaatattacagattggcttgccagggtagccgctcatctgtcacactcgggaagggctaagaatcaggagtcattcctagaactgttgatttgtaagaacacacaaccatagttgtagttgggatcaggaaggtaccaccattacaactggcatttgagaactacaaagtgaatggccagattctggaatgttattgcctcatgactatgttgcctgcagaaaaagttgaaacagcaaggtgatggcctccattttatttttgacttctgattctcacatgccgccattaaattggtgaagcttatttctcatccagaactcctagctgcaaaagggtctgagaaataatagtgtttaccttttcatcctctgcaccataggaaggcacaataagaggagattggaagggtgctgagtgccaccatatctacctcttcccccagcatgtttaaaataaaatatctttacctccaactcatattgcattttctgtccagcacagcaactagcttagtgggccctcagtagatgtgttaatgacattgacttccttatttcttatatggccccacctttcctagtcacgtgtcttggtactatgtgagatttcagatccacctgcctacctgtaactcttgattccttttcatttccattgctgtctccttgttcaggtccagctcctgtctgcctgggcttttgcagtagtctccttatctggcttttggtttctttcaccgtaaccatattataagtagattggtgtttaaaaatcagaacaacaaataacaaacatccttccactgtgctcctgtccttctcaaaagctttctgaggctcctcattacatgcaggatagaatccagactccttagcttgactttcaggaccttccataatcagggtgcaatctatcattccaggcttatctttcattttccccctgctggaactgaattttagccaaaaggtctaatcactgatgtcagagtgtcttgtcctttactaacttttcagctctgctatccttttgcctgcttttaatagtctgttttctttctcatttgtttattcctttgatcacttaggcacagagtttttttctcctttcttcatacttatagcatggtttactaaggcattttaattttattacctatatcgttagttttctttttatgactatatactctccgctcctttttatgtcgacaatgtaaatatttgttgtggattgatttgttgatttttcatggtttagacatctacttgcttgggaaaaaggggatggtggagggtcaatctgggggctgaagcggtactctagctgtgtgattttgtctttttgattactactgaaattaactatttgctttgagcaaactaatgctgagttttgtggatttagtgtttgaaaagggccctgagagggaaaaccctggagttgagctccttatccccgtttgccaggctggatgagctccatgtccataccactgcattgcagtttgctgaagtgtgtgttgtgaaatagcaatggaatttgtctgtggtttcttgccagcgaggaggaggaagaaggattctgagtaaatcagacatgtaaattagtaaggcccatgggccttaagcgaattacacaataaagcccaaagaaattcactttggcttctttctgctttttgtgtgtgtgagaaggcagctattatgtgtttgctttaggccagaggttcacaaattttttggcttcagaacccttttatactcctaaaaattgttgaggactcaaaaagcttttgtttatatgggttaaacctatcaatatttactgtactgggaactaaaacaggaacttttaaaagcctttattgatttaaaaatagcaaaaccccttcattacaagttaatgtaacattttttatgaaaaataactcttttccaatgtaaaaaattagcaagaagtgtgccattgttttacttttctgcacatctctttactgtctagcttgatgcttgattcttatacttttttgtttagttgttgaaatatgttgttttggttgaagtatatgaacaaaatctggcctcagacattaatggaaaaagggagtattttaattgcttcttcagctattaaatgtagatattcttctttgatattattccaaaacttgtcaagtgatagcttctattttaaaacatttttgtttttaattgacaataattatctatatttatggggcatgctgtgatgttccatgtacacattgtggcatgattaaatcaagctaattaacatatctgtcaccacacatacttattatttctttgtggtgagaatacttaaaatctactattttagcaaatttgaaatatacattactgtttactagtcagcatgctgtgcaacagatcactagaacttaggtctcctgtcaaactgaattttttaccctttgactaacatctcccctttctctgctctatcccaccaaactctggcaattactgttctgctctctacttctatgagtttgacttttttagattccatattttagggagatctgtacctggcttatttcacttagcataatgccctctagattcaagattcatccatgttgtcacagatgacagaatttccttttgtaaggctgaatattattccattttctttagacaagtgataatatcttaaagcttacttgcagtgtggaatccgaagctatctcaattaacttttcttactttgttatattaaaatctgttgatctcttttgcactttgaatgcatcttttacattcaaatgattttgtaacattacgttttgatcatttggaaaattatcatgtcactgagttatacagatcttccaaatgttgatgcatttcattatacagtgtaaaaaaaggtcacactcatcagtatcaccactgatcttatacaagtttttaagtattgaaaagccccaagctcaaggtagcaaatacaaattttctaaatttctgatttttcttgacaacctgaagtttatcattggcagcaaatatggtcagttgtttttcttgaagtggcaagctcacttgattaattgttgagaaaaagtctgccaaatactcaagtccgattaaccagaaaaatgtcagtcagctattttttcaagtaaaaatggtgttccatggggcaaattcagcccagaactcaaatcacacatgtacttttgtttgagacaaccattttactttagtatttatcagaagtactttatgtatgtttactattttgtcacacagtatagtaaaaagatagctacttaaagctcaagatttaatagaattaataatttttcctgcttcaccaaggacatgcttaagtgaaactaacttcctttttctttctcttttaaatggaatgcatggtaaagaacatagcaactagtaagtttttgaggtctattaaaacagcctgctcactatagttaataataatgtatatttcaaaattgctaaaatggtagattttaaatgctttcaccacaaagtatgtgaggtgatggataagttaattagcttgatttaatcattccacaatgtatacaaatgtcaaaacatcacattgtactccataaatatgtattacttgtcaattaaaaatagatgttaaaaaaactgaatactagtttagtttggtaccgctggcttgattagtgacaaggcacctgcagttttacccagcattctttaaaccgtcagtggaaatgtccacacggtgaaaaaagcaagtaatagtattattctgaaaatagtattgatcttgtggaacctttgccaatctactgcactatgccaattaggaagatttgagtagctaaaaattccaagagtggaataatagttttattagttatatcttgaaggccaatttccttttttaccctggaacttaggctaagtgaggcaacctggaggagaaaatttctctcctgtcctgagattgctgttagcccagggtcggaattcctggggcctgattttttgagtttaagaagcacagggaggatttttttttaacctgcctttggtgataataaatgtttaacctaaatcaatgtgattgtggattttttttttttttttgaattgttgtttctgttagaaaaataatgaatgacaagtgccgcagagatcagttgtttgtgagatgactgagaaggtaataggacctcctatttgggacattaaggaaagccttctctaaaaaaagaacccattttgagcaacatgcgaaaattctttgagtcagttggcctcatttgtaagcctttgattgctttatttgtttgtttgcttgcttgtttatttatttatatttggaaggcaatctttctgcttcctgactggctgtcagatctcccaaataacatcatccctttgctggtgtgaatatagcctagacttgaggcagcaattaactgatcatgtaatagaagaatcccaatcttccagtttctttttttaacttcttgggtggttggggcacatcattgcaacaattattacatttactcaagagtttgtcttttctattaaaaaaaaaattccatctaagtgccttacggtgaagaggaggagattgtgtaactggagtctccccttaactggtctttattgttaaagaagagtgatccctttgtgtttcagcttggcacacagaaactgttttaatttaacagtccagctcctttaatagatcaattctctattgtggtttgaatttggtgcactcccaatttactctaaacttctacgggcttccttggagaaactggggcagagatgccgaagactcatttcgggtacaatttagagtttgtttatttatataaatgtaaggggtaccagtgcagttttgttacatggatatattgtgtagtggtaaagtctgggtcagcttttagtgtaactcatctgaataatgcacattatatccattaatttatagttttatctcaaacctcttattaattaatgctagccatggaagctagctagcgcttgtaaatgcctgctgtgtgttagatgctctagtaggtgttttagacaccctcatctaatcttcatggtgattttctgatatatcctgaacctgtacaattttctccacttctgtcactactactacaggccaagccaccatcatttcttgcacagacttctgcaccctcaatgtggcctccctacttcaagttttaacagtcttctccctctcataatccactttccagacataagttggatttattttaaaaatatatatcaagtgatgtcacctcactgcctataagactcttcagtgacttaatgacaaacagaatgagatccttctcctgctctggctgacaagaccagaacaacctgggttctatagctctgagagctcaccagccactctgtccttgctcgttcactgtgctccagactcactggcttgctttctgtccctggaagccaccagactggttcttccttagggcctttgtaccagctgttcttcctgcttgggacactctctccccagatctttagtctgggcctggcttcttgtgatttgtgtcttgcctaaaatgacacccactcaatgtgccttccctgaccagctgagctacagcggtttccctctaccgcatcactagattttactttctttctttttgtttgagatggagttttgctcttgttgcccaggctggagtgcagtggcatgatctgggctcactgtaaccacctcctgggttcaagcgattttcccacctgtagagacggggttttgccatattggtcaggctggtcttgaactcctgacctcaggtgattcacccacctcggcctcccaaagtgctaggattacaggcaggagccactgagccaccacattcagcctagattttattttcattaaatcgcttgatgcagtgcagagtgagtttctgctattagactgtctggatttcaatcatggcctcgtcatttactggctgtgtgattttggagaagttacttaacttttcaggactttcatcttcttctttataaaatggaaatattattatatccctccattgtaagaattgaataaggtagtacttagcatcttttatggtttctgacacattgtacataatcaaaaaatgttaaatattgctattttaatgtaatgttattaaaatcattgcatattttatagcttatttatttggctatttttctgtctcttctaccaggaatataagctttatgagggaaagaatcttatgtgtcacattcccaactgtgcccctagagcttagaacagtgcttagcacatagtaggcattcactaaatctttgctgattattaaaatctgagatataattatccctatttttccaattgagtaatcagggttcagagaggtaaagtaacttacccaaggctacgcagctactaaatgctagtagttcctggtatttgtactgaatgctgattacaaagaccatgttctttctgttatgccacaatacataagtggatctttatttcagattctgtcatttatagcagatgattttcaggttgcctttttatgtaaatgtaacatgactcatgaaatgtaaacagccatttgtgtgaacatgaaaggtcagagccaagagttaggccacaggcaagttaggaaagtgagatatagcacacccaccacattcagtggtggaagaaaagttacctgattcctgccttggagatgtgtagggtagtgaccttggggttgggctgcctgaggaggttcctatgctttgatttctgaatggacaggatccctaaagtcatcgaccctagtttgggctcttgtacttcttctatcatcttattctagttggtggaggcagaggttgaaaaatcaaaatgttggctccttcagcctctaaaaagtaataggcttgaatttgcttttgtcactaacatgattatggtgcttggtctgtgggggcttcactgatgcattctttttaacagccctgtttgtttgtttgtttgtttgtttataagtgagcatagcacagaggaaaaaatataggttttggagactggcacatcagggttcagatttctgctgtgctacttcttggctgtgttttggcacgtgaacttctctacacctcagtttctttgtttatgtaatggggattcatatgacaattaaagagagagcttgtctaaagtgtcttatgtagtagtatccccagtttgacccttttgagaatctgatgacagttatggaaccctctccccagacaagtgcccgtatacccagaactttgtatttaatttcatggggttcatgaagcctctgaaactcagcttaagagtccataccaaccaaggtccttataggaagagcttgtgtttttgttttgttttggctttctgcagtctcttaataatgtttattgaatgagagaatttaactaatttccggtttccataatcactttaaactcggtatttgatttccttttccctgggacctgtgacagtgccagcttcatagcctagtctaggcatgccagttgcccactgtggcaatcaatatctgagcctgtggtttttgccttaggtaaactgtagagatggactcatggaatgcttggaaaatttttcagtttatgataatgtgtaaatgtcgagagccaattattgaggaatggcacctcaaagtatttgggtactctagatcagacatgaccatcttggtgtgtgaaattttgctaatgcatctttcctaatagaatatacaatctcagggctagaaagtcttagagatcatttaatttaattcctccagattgattaagtggtttgtccaaggtcattcaactggtatagtggcagagctcaggctgtacaaatcaggtgagtattcttcagctcctcagaagccagtaacttccactcacttgtgtgtgtctgaaattcattaaaccttcgacacaaagtgcagccattttaatgctgaatgatattcatcactgtctgaaatgggcttatttatgtacgaatgtttattcctatctcttcctccattctcccaaaatgtaaaccccataagaacaggaatcttgtctgtcttagtcacactcagtatccttagagccttgtgtgtagtaggtgtgtagtgaattttggttgaatgagtggcagttctaataatgtcagaagaattggaatttctttacagaaatctttatcagtaatttaacaaacatcgattgaacctattatgtatcaggcactataccaggcacaggtacgaatgagatatggtgctcagcttcaaggagttacagtctaaataccaaaataacagaatcaagagcagcagactaaattgggcccactgtattttttaaaaatttaatttgactgctgggtgcggtggctcactcctgtaatcccagcacttcgggagcctgaggtgggtgaatcatgaggtcaggagtccgagaccaacccggccaagttggtgaaacactgtctctactaaaaaaaaatacaggccaggtgtggtggctcacgcctataatcccagcgctttgggaggccgaggcgggcgggtcacgaggagatcgaggccatcctggctaacacggtgaaaccccgtctctactaaaaatacaaaaaattagccagggcgtggtggcgggcgcctgtagtcccagctactcgagaggctgaggcaagagaatggcgtgaacccgggaggcggagcttgcagtgaaacgaggttgcgccacggcactccagcctgggtgacagagcaagactccataaaaaaaaaaaaaaaaaaaaaaagtaaaagaaaattagccgggcgtggtggcacgtgcctataatcccagctactcgggaggctgaggcaggagaatcacttgaacccgaaaggtggaggttgcagtgagctgagatcgcgccactgcactccggcctgggtgacagagtgagactttgtctcggaaaaaaaaaaaattaatttgaatgcatgctccattatatcctatgtcttttaccttcctgctttgctcatttaactgcctgatttctgatgacatttaagttcaggtcttaggttctgtagatcagtggtttctaaacctggttgatcatcacctcacctcactggccttagaaacaatacagaccctacttctggagattctaaaccagggctgagatgggcccttggaaactgtattgaaaaacagtaactctatagtcacttacaatgagcagccaaatctagctagatgcccctgctttatgggtgagtgttgagcatgagggtttcgtcttaaaacctggacttgatattctatattcatagcatctttcatatccttaaagattctatgtacttttcagcacattgttctgtttcaaggggctctgcaaagtatacttgctgtctgtacatttccactgtgaaaactccttgaaatcatgtagacaaatgaaagctaaacatcaaataaataacctaaactggtaatactcccatttggctctccttgtgtcttttcatgtgggttagctcttcaaccagattcagcatataaattgagtatgtatggttatatggtgactttcaaaagtaaatactttttctgtggaacaaaagagatggatttgtggttttccaggattccttttccctgacttggtagaaagatagccaggcatagctcagcagacctgaaaataggtgagctgtcaaggtgttggcagggagaggctcctctgggtgggacttggggcatcctaccagcgaaaaagagactaagtttaagtgatttcacatttgggctttacttactataattgctgaagtgctaaattgagtgtgacaaatctaacaggtaattgccaagtaggtttcattaccagtcattgcatagataaatgatgttccttatgttaaaaaataaaaccaaactaaagaaaaaaaattggactatatttggaggtagaattcagatattgcagatatgttcatatacatcaaagctgtttcaatgtgtcaacgaactcagttcatttacctctgccaaggtggtatagtgtatgtgggagtgcagagtgggggaaagtgaggaggggttgtgatttatgagaaactgtaaaagaggttagaattgggaaacaagtttttttcttagaggagtggcaaatagtaagtagcatttggacctcactcagctctaatagttaaagctaagctttttgacattatcattatatattaataatatatatgtgtgaccagcctcaatagattttattcattagtaacttggttgatttaatgaaaatagttttaaaaggcatactgaagcacagtaaaacctaaggctcacatcactgtctggggagtcagtgaggaacagggcagagtgccagtgcatatgaagagggatttttttgccttcttggttcactgcatattcccagtaattggaacaatgcctgacatgaagtagacataaaataattactgaatgaaagtggaaaggaaagtatacttagtctctgctttcatggagcttatatgctagtgggagagagacaaaaattaagtacaaataaataaacagaatatatgatagcaactagggtgagagtgctgtttttgataggatggcagggattgggccatttggggaatgaattgatgagaaagagaaagttgtgcaaagctgggagaggaaacatcatttgaaggacagaaagaaggcctacatgatttgagaatggtggagagagagatttgagggacagacttgctatgattaagaaagatagctgggcgcggtggctcatgcctgtaatcccagcactttgggaggatgaggcgggtggatcatgaggtcaagagatcaagaccatcctgaccaacatggtgaaacccggtctctactaaaaatacaaaaattagctgggcgtggtgacatgcgcctgtagtcccagctactcgggaggctgaggcaggagaattgcttgaacccgggaggcggaggttgcagttagccgagattccgccgctgcactccagcctggtgacagagcgagactccatctcaaaaagaaaaaaaaaaaaaaaagaaagtcatgataaagagtgtggattttattttacgcaaagtgggagctcattaagaaggtaaaagtttttaagcaagggaatgacatgatttgacctactttttaaaggaggttgctctgacggctgtagaggatagaccataggcaggggacaatagagagaccaggaggaggctgttggagtgtgttaggcgagatatggtgagtggtttcagaggcttgtgtgagaaagttgatacactgcccctaccccatgcaaacacacactttcttttcttatgatgacctttctttaaaagcatttgttggaatatgagattataggccataagtgagaaaacaactctttttgagctgtgaggaatactaggagaggagaaagtgagctgtgtgtgctgcccatggtggtacgctgctatggttctacagttccagtcatttttgacagcatggattcaatgcaaaatggcaacacacactctgtatcttttggcagatcagaacataatgaaaataaaataaaaaaattcaaaactggctcttgaatgaaataggattcagaagagatgatctcaaatctactttatgagataatgtcctttttaaaaataaacactaacatcagttatgcatttagaatgtctgaattattattctaggttccttgcgactgctgtgaattttgtgatgcacttggatagtctctgttactctaaagttttaataggtaacagtcagaaatggagtgggagagcataaaagcaaactgaaatgcaaatagctggtaccctgaagccattaactttaagctggttattcctgacctactgtttggacataagatggtagagaggctgagtgtgacttgaacatttgttccttagaaacaccatccttgggctgggcgcagtggctcacgcctgtgtttccaggactttgggaggctgaggcgggcagatcatgaggtcaatagatcgaaactatcctggctaacacggtgaaatcccatctctactaaaaatacaaaaaattagccaggtgtggtggcgggtgcctgtagtcccagctactcgggaggctgaggcaggagaattgcttgaacccaggaggcagaggttgcagtgagccaaggtcgcaccactgcactctagcctgggcaacagagtgagactccttctcaaaaaaaaaaaaaaaaaaaaaaaaaaaaaaaagaaaaagaaacaccatccttgtaaagagagcgcatacaccttcaatttctagggcagcagcgtttgctttacaacttctatgtcttggtgggagtagcactatctatcaccttatgggccaaagggaaaaagtccagtgaaaatggctctgatgttgttggaagtgggaaagcaggttaataggttcttcttaatggaaaatgcagccaatattggccaacttactttgatttcggtagtcataacaccaccctggaaggcaccctagatagaggtcacttgctaccactcattttacagatcaggatactaaggattttcctgattttaagcattaagtatggatatccctgttggttgaagttaaattggtcaactagaatttaaaagcaaaaattaaaaaaaaattattttgtattaggtttcaaaggaattgttgtcagtaggagaagcctgattgttccttttacgctgactcatacagtttcagcagattacatttgaggcctaatgttgaaatctcatctgtaagtctggtatatctaactaatcatataaacatctttcatcttagactgtgtagcatgtccctagtagaccaggtgggccaaatgacattatagttaaatcaagccaataaatatatgagaaagaaggcaaatgagcgtagactccatagtgaatgatggaggttccgacgagtcaaagacactgaactattcattgctattggtttatggaagagcaaacccagatatgtgttatgctgattctgtgtgattggctacttccaggattgaccctgttctcctgtcctgctcaagtctccttccttcacttaaccatatattgtgggtactcagaaatgccatgcttttgtttagagtagcaggattggtgttgaagatcaacaagaaaaagcaaaatgggcttgtctgtcccatcaagtgatgtgctgtcaacatatgtagaatatgtgccctgaattaggagaaaaaagtagagattcctgagtttaggaaattataatctgatgcatcttcttcagactcaagccttacctaaagtttgtaaattctttctctttcgtctttattctttctctactcttaacatttttttcccccacctctttggctatatgctgttctgcttttgatacagaattgaccttatttggccagatggggtggctcatgcctgtaatcccagcactttgggacgctgaggtgggcggctcacttgaggccaggagtacgagaccagcctggccaacatggtgaaactccgtctctactaaaaatacaaaaattagccggacatggtggtgggcgcctgtaatcccatctactaaggaggctgaggcaggagaattgcttgaacccgggaggtggaaattgcagtgagctgagatcaggccactgcactccagcctgggcgacagagctagactctgtctcaaaaaaaaaaaaaaaaaaaaaattgacctttttcatgcccaacctctatctccattatctcctagctttttggaaaatatttagtactggcatttcttcttcactgatttttcattctacctgtctttagtatcataggggtagttacctcagcgggggtagggagaccttgggtgtctcttacttgtacatactctgtcctctataagtaagtgtgtaaatacactgtattttcccattcagacatattgtgtaagtaataggaaccaggtgtttgaataaattaaccaagtgccaaatttcattttggaaatgaaatattttagtttaagactctaggacatttataaagctgaaatacattgcaaagtgatgaaagctttcttaaattctgttatagtcatgcaccttaaaattattcattgttacttatagttattatctgtctgtatatgctcatctacatatgtaaaacatgaagatattctctcaagtgaggacttcatgtgccagatttttcagcctggattgaattttatggatgagagagataccctggaaatggaaccattggcataaccttgtgtctaatataataacagagctctaatgaactgcaacatgagctcagatctgcaaaatattcagaggatataggcaaagagcagttttttcctccttatgagctaggttgttctccaaaagcaacaagtactacttgtcttttcagagcgctgtcatggagctgtaagtctctttgtggtttagacttaatgtgagtaagattcctctgcattctcagcctagaaaaacttgaccgttctcttggaatttggtgaaagtttcctaactttgaagctagagaatactctcatttcagattaggcaattattaacatttttttctgttctaatttcatgatgccaaaaaatcatgtatggttgatctatttggagaacaatatgtagcctcagacacttaagatcatatgtagtttagaaataatgtcaattgcatatgaatgttttgatgtttttcccccagcctttctgaattttttgatttcttcaaattgtacctggttttttatttttgtttctgtttttgtttttgactttcacataaactgtttatagtgtctggaacatacatatatatatatatacacacacacacacatatatgtatgtatgtatacatgtgtacatgtatataaacatgtatatgtatgtatattccagacaaattatataaatgtatgtatatatatacaaattatatatacatatacgtatatatatacaaattatatatatacatatacgtatatacacaaaaattataacacaaattatatatacatatattttgtacatatacaaatatataatatgtttgtgtatgtatagttatatatacacataaatattttgtattttgtatatatgtatacatatacattttgtaatatatacgtatatattactatatgtatttttaattgtaaaatacacataggataaaatttataattttagtccttagccattttttttaaccatttaacaagtggtattaagttcatcctcattattgtggaacccatcaccactatccatcttcaaaacttttccagcagcccatactgaaactgtaccaattaaacaataactccttgtttctagcttcccccagcccctggcaaccaccattctattttctgtctctacaaattcaactatttcaggtaacacatataagtagaatcatacagtatttgtccttttgtggctggctagtgacgacattaagattaaaatcaggagaaacagggtgggcatgttggctcacacctgtaatcccagcactttgggagcctgaggcaggaggattgcttgagcctaggagtttgagaccagcctgggcaacagagtaagacccccatctctataaagaaaacaaaaccaaaataaagcaaaaaaaaaaaaaaaaaaaaaggagaaacagatttaagacagtcaggaaagaaaaatattgactttgattttggtcttattgaatcttaggtgctggcaggtgaggactttcatgttgtaatatcctgaagacagtttcaaatataggtttggaatggagatgaggacttcagagttatcggtaatgaactcattttaagaagatgagattgcctaaaggaagaatgttttgtagagttagaagagtgggatttacctgatgatcttaggaattctggacatttatcttaaattgctctttaggaagtttagtagaaaaagaaaggatgcagatagtgtctgctattaaaggcagaggaagaaagacctgaaacagagacagagaagaagggagcttaggttataggaataaaagggagaggatgtcatagaaacgaagggaaatgaggattttgagaaagagatgcaagtgactgtgcccagtgtttccctaatgaccaagaggatagttctgggttttagcaagtatgagttggccattggccttgggaagaatagtttcagcagaatggtagtggttgaagccagatcctcataggggttagggccaaaagaaacagtaggaattctaggcatttatctgaaattgctctttaggaagtttggtggggaaagaaaggatgcagatagggaatctcaggcacatagaggttaagtaacttgctcaaggtcacacagtaaccttaagtaggcaggataagctctggttctggagctggtgctcttcatcattattttaggctgtactctcccacctttttttctttgtggttgtaggtggttgtaggctacttaaagagatacctatacacctgcagttaaaatccaagtaactcagtggagagcctggtccttcgttattatgtctcagattgaagttttatattttacagcatgatgaaattacatatatgatggttaggttaggttgcaagtcttggaatatatgcagaggaataactttattacaatgactatttactttttataagacaatccagcaatggtaatttttcattagtgatataattgcaagaggaaacttgagaacagaaaatggacatattgaaataagattaaatacatgctgatgaagttacagagttttatgcaacgtttcaatcaagaaagcatgataataaagcgtgtataggccgggcgcggtggctcacgcttgtaatcccagcactttgggaggccgaggcgggcggatcacgaggtcaggagatcgagaccatcctggctaacacggtgaaaaccccgtctctactaaaaatacaaaaaaaattatccgggcgtgatggcgggcgcctgtagtcccagctactcgggaggctgaggcaggagaatggcgtgaaccctggaggcggagcttgcagtgagccgagattgcgccactgcactcccgcctgggccacagagcgagacttcgtctcaaaaaaaaaaaaaaaaaataaaaataaaaaaaataaagcgtgtatattgactttccagaatcttgagaatggataaatggaaacaaagagaaatacctattttgtattataaacctctaaaatagttactaaataagttattcttttaggtatttttctttcacttttcatcgctattaggcaaaactgatagtcgatgtagctgtgtcagtagctaagggatttttgttgttgttgttaaactaacatgtcatatcttgtataattcagctgtgactatacaggggaaagtatttaatgtctgatgattatacagcctgtgctttggaaacagccgaaagccagacagcgacagtagagggcaaaggattattaaatggatagtcactgaggtcacttatagtgactttactgcaacaccgtgtgcatctcctttcccatggcaggttgtttgatcatggcttaatggctaaagctttgtaaaattataaaaaaagccagaaatcctgctgatctcaagtgttatttacagttggatgcttggcaggaaagtgctaagtctgatcatactaatgctaagtcaggcagaacacgtggtgaaatctcatggagctctatcctctgaaccttgagaagactaccaaagtataagatttcagggtggaaagtatgctgcaatatgattgagagaatttggctttttcatctgaacaggtgtggccaagtggaggagtttctcctcttggaaatgtcaaggggtgtatcattaggtccttggagctagaatgtaggtagaatggcaaggaaggaattttaattagttctgttatctttcttttatggtttggaatggtattttctttggtcatctattcacttacaaaattatggacagtatttgattgtgaggaagaatcttgggtaagtgttatctttgttttcagtagaattacttggagctggctcaaggaaattatattagtagtttgcaagtgagttacagctaatggagtcaaaagaagtttgaaaagggtcaaaagaagttagaattgttccatctgagtctttggcccttagtaaaggatccagcattttgttttgtttttgcttatgtctttgatattaatatatttttcagaatattataaaccacccttccccaaagttttatttccgcaatcactccctaatctttatttcttttttgcttcgcatcatatacatttttctcttcaggacaccttcttttcccttttgaaacttggactatgttcttaaaattgacgattataggtaagaagaccaagtttgtgagacaaatagaatttgatattcaaattatctgaagaactgaagtacattattttgtacttgtttttatttattaaaaaaaatttcccttggaaaagaaattggtgagattaaggaatgctatagctaactttgtaggatatttggaaaactatgagttatagtgaaaggtgctgtcttagggagtacattttaaaagtgctagaaaatataatattacagcttgaatcaagagaagtgaactctgctagggactaagtactttgttagaaaggtgctcataatagaatggcgtgaacgcgggagacggagctttcagtgagccgagagcgagactccgtctcaaaacaaacaaacaaacaaacaaacaaaaataaaatagaaaggtgctcataataaaatgagaaataaaaaaaattctaactgatcaaatgggacaaaacccagattcacggtctttatatgcaaataaagtatagattcttagattcagaacagtaaaagaaaaatacctagaaaacaataaacaaaaggcatgaacaggcatttcacaaaagagctactgcaaagtcacaaacatattaaaagttactcatcctaactaacaatcaaataaatgtaaattagagcaagcaaacttgtttttccatttatgaacttgccaaagatttaaaagtttgataataatgaatgtttgagtatatgaagaactgggtattatttgttgatggacatgtaccatagcatttttctggagcgtaatttcacaatgtgaatcagaagtcttaatagtgcatacgttttgacctagtgaatctcctgctaagactttttatcctaaagaagtcatctgtgccttcttgtcaagatggtactgtaagctcacagtttgtacataccttctgctctaaattcataggaatggcagatataatgcattaaaagaattaaagaaaaaagtcgtagctgggcttacagacaagatagtgttgtagacccgaaagctaactaaacataaagggctagtaagctggattgaagcgatggtgctgcagaggctctggatggagaaacagaaagctagatttagctcccatagagtgctaggactgaaagtttaccacttgaaatgggaccataactaagctcactgcttaaagccaggggcagggatgaagttgtcaatcctataaaaggaaactaaataaaggctccacatggaggctccagtttatatggagctgtgggtcttgaggggcaggaggagatagattcaatttcaagaatagcaactgaatcaggctgactgtgaggagacaataatgagaaaatgtggtgttccatgttacaattatgaggtttggtcctggacagtagcacagggatcctggtggaggcagctgcagaaacactatggagggaaaggtgagcacaggtggagagaaaggggagtaagagaagcaaagaagaaaagcctttcacttagaattagccttcaaaatgcaataccaaaatactggaagaaaataaataccaagaaagatagctaacaaaatcaacaatgagaacaaaaatttatcccagatgagatgaatttttacagaaaagtcagtcaaaaattaaaagaatcatgttcagaatactcaaggggataaataaaggcattacattgatgaaaaatgatgtttaaaaatactcccaagatatgcagaaatggaagaggaacaacgacatgaaaaagaaccagttacaaattttggaaatgaaaaatatggtcatagaaataataaacttaatagaggggatggactttagacctcacacaattaaaaagagaattgatgaattagaagagaatactaaggaattcattcagaatgtatcataaagagacaaaagattttttaaaaggcatttaggagatttgaaggatagatggagttccaacatatgtctaataagagaacacagccttgaacttttggcctcaagtgatcttcctgcctcagcctcctgagtagctgggactacaggcacatgacaccagaccctgctaatacatttgtgtgtgtgtgtgtgtgcgtgcgtgtgtgtgtgtgtagagaccagattctcgcgatgttgcccaggctggtctcaaactcctaggctcaagccatccacctgaggtctcagcctcccacaagtgttgggattacaggcatgagcctctatacctggccaagaagcaaaatgtaaagagccaagaattgagaattttcctatttaaagaatgatgagtttagatatattgagtagtatcatcatgttgacgttgtagaatttaagggatatagaggaaaaaacatttttgagatacaaaacaaaaaaatgccaattacctacgaaagaaagattagcaacaatagatgctagaagacaggagaataatatactaatatattcaaaatgctaaggggaagttatagttaattttgatttttaaacccagttagtctttgattcaaaagtgaaggaaaaatacagatactttcagatataaagaaagaccaagagagttaccatccatggaatctcaccagggaaactgttaaatgctgctctttagcaagaagaaaagtgaaaccagaagtaaggttttgttttttttctttctttctttcttttttttttttttttggagacggagtctcactctgttgtgtaggctggagtgcaatggcgcaatgctgactgcaacctccgcctcccaggttcaagtgattctcctgcctcagcctcccgagtagctgggattacagacatgtgccaccatgcccagctaattttgaatttttagtagagatggggttttgcaatgtcggccaggctaatctggaactcctgacctcaggtgatcggcccgcattggcctcccaaagtgccgggactgtaggagcgagccactgctcctggcctagtttttaattaaaacaagtgaacaaacaaaggtgggcatagagattgataaagtgtattggaaaattcactaagttattggtttaaatactactttttgttctaaaatgaatataaagctaaaactctggagaatgatgagaatgtaagaagggagaagtaaattatgtgtgatccaatattagggacacaaaaagggacatactacatgaattactaatatctaagaaaatatgatacatttgagaacttagatgaagttgatacatacctagaaagataggcattacttaaattgcttcaagaagtagaaaatctgaataaaacaatgaacgaaattgaatgataatgaaaagtccatctgtcaaatgacagcaggcccagttttataggcacgttaaaccaaatttaagtaatccttacttactcttcttccctttttaaagagttttattggggtataattgatatagaataaactgcacatatttaaagttttgacatacgtatatactggttaaaccaccaaaatcaagattaggagacatgttcattatcactcctaatttgtgtccctcagaaatccttttctccttctctcccctagtggttctgggcagctactaatctgctttctgtcactattgactagttggcattttctcgaattttgcataaatggaatcaatcaaacagtatgtgcttttgcactcgctctctctttctctctcccttttaaaaaatagattctggttttttagagtaggtttaggttctggcaaaattgtgagacaggcacagagatttcccatatactccctacctccacacatgctctgttacacacactccactattatcaatatctgccattagagtggtacatctgctacacatcattatcacctaatgtccataagtttaataaaccattagggtttacttttggtggtatatattgttgcttgggacaaatgtatagtgacatgtacttaccactgtgttatagtatcacacaaagcagtttcactgccctaaagattctctgcactgtgtgctcttttttggaggtttagggggaggcctgtcttccgtcactcagcattgtgattttgagatccatcatgttgttgtatgcttcactaattcattcctttttattgctgattggtgagttattatatggatataccataatttctttttctttttttcaatatactgcgatttctttatctgtgcacttgttgatggacatttgggttgtttccagttttgggtaattacaaatgaagctgctgtgaacattcatgtgcagatttttatgtagacatgtgcaatcatgttgtaggtgtttaatatatatatttttatgaaagttccagattgtcttccaaagtagttgaccattttgttttcatgagagcagtgtataagagttctagttttgagagcagattttcttaaatttcatgaagtttatcctttttttcttttatggattttacttctgggttcatttctctgaaatctctgccttgtgtaacttaaatactaaaagagtttcgtatgttttctaatactagttttatagttttaaggttttatattaggttttatattgatgtatttattaattttgagatatttttgtgtatgcacaaggtgtggattggagttctttaaaagatatagatatctaattcttcaagtactatttgttaggactcttctttctccatttgaatctttgtcaaaaatcaatgaaacataaatatctgggtctattgtggacctctattttgttccatttatctgtttgtttagtattatatcaatacagcactgtcttgatttctgtagttttatactaagtcttgaagttaggtagtgaagtccttcaactttattttactttttcaaagatgttttgtcactttaagtctttgcgtttctaagtgaattttagaaatagaatgtcaatttttacaaaaaaaacctgcagggatcttagtttgagattgcatcaatttggggacagtgaaatattttatcgagtcttccagtccactaacatggcatatctctttgtttaatttcggtagtgttttttaaattttctttgtataagtgtggaaaaccttttgtccagtttatctctgagtactttataatttttgttaaggtacatggtatttaaaaaaacttcaatttcagattgttggttgctagcatataaaaataatttttgtatattgatattgcagtgtagctaaacttatttattagctctaatagctgttttgcaaattctgtagaattttctacatagatgcttatgtcgtatttaaataatgacatttttaccttttaaaaatttattctcaatccggatacttttcacttctttttcttgccttgttgcacgggctagaaccttcagtacaatctggcatagagggggtgatgggaaacatccttggcttttttcctcattttagggtaaaatcattcactcttttaccactaggtagggtttcattgattcctttattaagatgaagaaattccgtagtttaccgagtgtgtttatcagggtcattgttgggtattgtctaatgctcttacatctattcaggtgaccctctagtttttctttcttagcctgataatatgatggatttatgtagatttttgaatgttaaaccaacctggcgttctgggggtaacacttggttattatatattgtcctttttatgtgttgttggattcagtctgctaacattttgttaatactttttacatttatatgcatgagggatattggtctgtagttttcttgtaatatttctgcttgcctttgggattgaaagccattaattttctggattaatttatgtagaattattattatttctttcttaaatgctttgtagactttatcagtgaaggctttggatttggagttttgtttgtgggaagtttttgaaatacaaattcaatttcattaatagatataggactatctatgtctactaaaaaggggctatccttttctttttcttttttttctttgagagcaaggcctatgtcttgatcaccattttgttccaagcatatccctggcatatagtgggtcaggagtaaatgtttggtgaatggatgaatgaatgaggcaaactcagggagaggaagtggggactgtgtctgttcttggcccagtgtggggttgtttgtggatgacatctcattctcatcctgtagtagagggataacacaaaagtatggagtctcagggctccagagtcctcatcctctgagctacatctcctacttagccgaggtcttttcactctctgggcaagtctcctcactttgctgaaatggcagcgttcctggtacatgcccggtttagcctaggctaacctcttcttgagtgaacctaggtaatttgtgtctttcaaggaatttgtctattttatctaagttctagaatttattagcataaagtttataacatccccttattatccttttaattggtatgttgaaacttctgtgtgtatttttaaatcattctggctagggattttaaattttcttttctcaaagaactagcttttggcttcatttttttttaacttttctgttttctatttcattgatttctgttgtggtcttttattattttctcctgtgtattgtatttgttcttctttttcgagtttctccaagtggaagctaaggtaattgatttgtgaccatttttcttttttattataggcattcagtgccataaatttccctcagtttactagtttaggtgcatcctacaaattttgaaatttgtattttcatttttgttcaacttaaaatactttctcatttctcgattgttttcttctttgactcatgtattatttaggaatcaattatttagttttcaaatatttggggattttctagatgtatatctgttattattttaagtttaactccattttatcacagaatatattttttatgatttcaatccttataaatgtattgagacccagagatggtctgtcttagcaaatattgtatgtgtatttgaaacaaatgtctattttgctgttgtttggtggagtgctatctacatgtcagttagttcaagctggttgatggtgttgttcaaatctcttatggtgcttttgtctacttgttctaccagttattaagacaaggatattgaaatcttagactattaattatggaattacctatttctttttgttctttcagtttttgctgcatgtttgaagacctgttattaggtgtatatatgtttaagatttttatgttcttgatgatttgactcctttatcattatgaaatgactttttctcttgtaatattttttgttctgaattccattttgtctgatatcaatatagccacttcaactttcttttaattagtattactgggtaaatttttttccaactttttacttctttacaaatctttttttattgcagtagaatgtacataacatataatttatcattttaaccattttaaagtatacacttatgtggcattaaatacaatttcacaatgtcttgtccatccttttactttaaatcaatttgtttctttacatttgaagaatattttttataggcaacctatggttgcatactgcttttaaaaaaatccaatttgacagtttctcccctttaattgggttatttagatcatttacagttattgtgattgtttctatggttggatttaattctaccacttttgtctattctttgatccctttttttcttgatttctgccttttttggatttttttataattccattttatctcttttgttggcttattacttgtaattttttggttttttttttatgttggttttagggtttctggtatccatctttatcgtatcggaatctttcttgaagtattactgtgcttcacatgtagcataaaaatttttaccacaatatacttttcatatctctttggccattgtgatgttgctatcatacattttatttctacatatgttatgaatcccagaatgtactactcttgtttttgctttagtcaattatcttttataaagacttagtgagaagtcttttatatttcccatatagttaccatttctgatactcttcattctcttaagtattcagatttttatctattgtccttttctttccacctgaagatcttccattatcagttcttatcttgaagatctgctggtgttgaattctttctgcttttgtgtgtctgaaaaaatatttatttctcctttattgttgaaatacattatagcatttccccactgtcttctgtcttccggcaaccattttttttttttttacaatgagctatttggtgttattcttttttttctttttttgaaacagagtctgactcagtcacccaggctggagtgcagtggtgtgaactcggctcactgcaacctccacctcccaggttcaagtgattattgtgcctcagcctccccagtagctgggattacaggtgtgcgccaccacacccagctaatttttgtatttttagtatagacgaggtttcgccatgttggccaggctggtcttgaactcctggcctcaagttatccacccgcccacctcggcctcccaaagtgctgggattacaggtgtgagccaccacacgcagtcttatttggttttatttttatagtttttttgggtacatagtaccttcatctcttgctatctgtgggggattggttccaggacccctgcaaatataaaaattcatggattctcaagtcacttatataaaatggcatgtcgcatttgcatataacctatgcacatcttcctatgtactttaaatcatctttagattacttatagtacctaatacaatataaatgctatataaatagttgttatatttcattgtttagggaataatgataagaaaaaagtctgcacatgtttggtatagctgcaaccatccattttttttttcagcaatattttttatctgacattgtttgaatccataaatgggaaacccatatatatggagggccaactgtattttcttttgtctgactgcttttaagactttatctttttcactggatttaagtaattcgattatgttgcgttttagtgttatttcctcttgatttttgtgattgaagtcctttgaacatcttaaatctgtggattgatggttttcatcaaatttggaaaatatttggccacttctttttctgtcttccaatctctctcctttcctttggtaactccaattacatgtattaatctgcttaaaatcatcccatagctcactgatgctctgttaacctttttctcctgtctttttcctctctgtatttcattttggataatttgccttgctgtgtcttcaggttcattattcttttcttctattataactaatttgtgttgaattattattatccagtgtatcttgcctctcagatattgtggatttactctagaagcttgatttaacgttatttctgtttctctacttaccatgctcaatcttttctcaactttttgaacttgtgaactatagctatacttactgtttcagtgtacttgtctactcatttcatcatctgttctgtttttgcaccagtttcaattagttgatttttctcttcattatcagtcatattgtcttgccttgtagtattctcttagaaacttccatgccttgttgcttttgattggatgacaaacattgtaaatttttaacatttaagtgctggattttgtgcttgctgttcctttaagtaactcatttatgttacttggaaacagttgaatcttttcaggtgttgcatttaattagaaaggaacagtgtgacattgagtctagggctatcgcaccactgctgaggtgaagtccttctgagtgttcttcctgatgttttctaaattatgacattttctatccaggctagatttttttgtatgttgtagtgttggctcccattattggaaacagaacaagacttgctaagtattaattaaaaagatctcttttgaaagccttgtggagctaccaaagcagccaggacttgagggtccaagagcagtggctgtaagtattggttttaaaaatttataagtaggattgattttaattaaaaacttttaaaaaaatgttgtgtatgttgtttttcagttaaaaattaaacaattcttaagagagatgatttctcttgcctcagggatggtgtggtgtagtgggtgtggccttgtacctgggaactaagaatgtgagttgtgattctttcataagcagcagtatagtctcttgccagtcacttcatagctctggatgggccttagtttctttatatgttctaaaattatgcaattttgtcatattaaaaagtaggtgatcaccacaacatagttaattgacacattttatatatgtaaacttttatgggaagtttttatacatttctcctgtagatcactgaggctaattaatatctggattcttattaatccagtggcattaatctgtggcctaaagtataatttgatgtggtacacatagattcctgtataagtaatttataactaggaaataaaactgtcctttccagacatgagtaaataacaacaacgaatggttgccaaaatgtattgaggggctgtttatgtgccagacactgttcttagagctttatgtattaatatcatttacatctcacagggagataagaaactagttgcaaatcatgcacctagactggtagaactggcattggaattcaagagtttggctccttaggctatacacacataacaaaggagtttgctttgttatacagacccctgcctcactgtttgaatgctatttgcctaatatctgcatagtttatagtttgcaaaaggcactaatatgtatgaataattttattttatcatcacaactctatgaaacagtgtccttacagatgaggaaattgagaatgagcgagtttgcttccgatgtggtaccgcatcgaggaagtgaaagagtctccattcaaaattctactttcgcctccaaatccagtttacttttactgtgccatattttcatggagagggaagtttttcgtaggacaaggaatgctaaatttgttgaaatggttgaaatactttttttcttcttatctaaagcaaatatggtatatgtgaaatatttacacttttttggtttagctacttcttattgatcttttttttttttttttttgagaaagaaccatgctgtgtcaccatgcagcggtgactcactgcaacctccatctgccaggttcaagcgattctcttgcctcagccaccctagaagctggaattacaggtgtgcgccaccatggccggctaatttttgtatttttggtagagacggggttccctttgatggccaggctggtcttgaactcctggcctcaagtgatccgtcttccttggcctcccatagtgctgggcttacaggtgtgagccaccgcgcctggctcttaatgatctttctagtgttagtttagatatgtcttccttgcccaccaagcaccctgcttaaggactaggtcattttcccacttaaaaccctcataagatcatgcagttattttcacaatgaacattcattagccattattcatcactgtattttgaaaagactcaggtaacaaaattaaatttttactgaacctgacacaataggatgcatagttgaagaagtattatgtggaaaatgataaatggataaagaataagtgtcattagcagcataatcttgacacggctgaagagtcaggagtgggatgaaaaatacacttcatttgtaggtgagatacacccttacatgatgagtcataatccacttaatctttttatgtaattactgtaagactctcaaaccatatctctatgtgacaagatatacaagctcagatacagcttaactttttcacagtaaagcagaggcttagggctggtgtagtttctgatatctaactttaaacccttatgagtttgagttgtggttttttttttttttttttttgagacagagagtcttattctgtcacacaggctggagtgcagtggcgtgatctcggctcactgcaacctctgcctcccaggctcaagtggatcctcctacctcagcctcctgagttgctgggactgcaagtgcacaccaccacgcctggctagtttttgtattttttcgtagagacgggtttttaccattttccccaagctggtctcgaactcctgagctcaggtgatcgtcctgcctccacctcccaaagtgctgggattacaggtgtgagccactgcaactggctgtggtgtgtttcacataggtcttttgtcctcttttactttgctagagctgtggaaatgggtggtagcctgtgtgcaggggtcttcatctgcccctcctgccaggtaggagagctgaggcttcacgctctctctggctctccgtgtggcatttgtgagcagcttgatgtatttgacacaagtgtgacagcaaagaagtgtgtgagcagagcagtgtgctgcagggcccagctgtgtggatttatctgtacatcaggctgaggagcagcagttagccagatctgacagtcaaacgtgagctccttctacctgtgctccagagcgcattttaatgttgtgtgtttttactgtggttggcatttgacacaaagaaaattgtcagagctgtttttttcctctcctctttagtgtgctagtctgcaatagttttccaaataaatacttcattgtacatggacaaaagaaggcactttctaaaacaatgccaaaaatcatgttgtcttcatctttatactgaatttcatgtgaggaattagtaggttagatgtttgaattggtaataggtaagacgtttacatagtgcaaaaatcaaaacaatataaaatggaatattttgagtagtcttggctctgccttgctcctttctagtcatttcccacctctattgacagataatcactttaatagtctgtcatttatcctttgtgtttctgtatgcaaatacaagcagagttttgtgccttgctttttacttcccaatatcttctggagagctttttagttcataaacagagagcgtccttgtttttgtttactgttgctttatacttcatcatgtggatgtcctgtagtttattccactgtcccctgtggctggagatttgcattgtttctaatcttattgttttattgagataataatttccatatcataaaattcaccattttaaagtgtacagttcagtggtttttagtgtgattccaagctttttttctacaagtaatgatgtaatgagtatcctcatgcatatattcttctgaacatggtacaagtgtattagaaggataaatcagaagtaggatcactggctcacatgggaaatgcatttgaattttgaaaggagttgactggttaccctctctaagtatggttttgttttgccctcctgacagcagagaatgaaagggcctgtttctcttagtcttgcccatagtgacctcgcttttcataaagcaatcttaatatttgtttttttataaagcagttaagaatttttaattttgatgtttatgagctaccaatttactattgatatctgattgatttcaccgatgtaagcatgaccaaaacttctctttatgtttgtaaatattgttatttaatacttgatcttgtcagttacttcgtaaaattgcaagtactgagtgttggtgttcagagcagatttttatctgtagggtcttaagctggatgattttctggtccccattctctgctgtcatgtagatacaacagtactcacaggattaaaatgaaaattcctagtggaagatcaattatatgctgcttgctctagagtaggaaaaatcttgtcaaattttatccttttgatacagccttataagttacaatgttttatacctgtctgatgctcagttccgaaatgaactgagaagtggtggttgttacaagaatttagctgaagcattaattataagcagaggttcagcctacattggcacttgtcgacctatgggacaggtctgttgctgtttcatctgatttaggtggagtatgtaattacttttgggaatccatgcttttgtgctcctctttatatgtagattagctttactgatggactctcatgaagagatcttaaggtggtgtttgcaaggtggagacatttcaaggtttgagaaatgtgtgtttgaattattcaaggcttaccttttttggcatttataaatattctggcactttgtgtctataaaaaagactaagaattgataaaatattcataggaaaatggaggcttttctgagcttgaagtaaaaattgaggtatagattttgattaaatttatgatggagtggagaaatgtacaagtatggcatggaaatatcattggttctttctatggcccaaataatagttaatactgaaaaatagataaatcaattaaccaatagtgaattatccaaactggtttgtcgattatctgtaatggtgtgtgttacattagtattataactataaaagtatcataatttaggccaggtatggtagctcacttctgtaatcccagcactttgggaggccaaggcgggcagatcatttgaggccaaggcgggcagatcatttgagcccaggggtttgagaccagcctggggaacatactgaggcctcatctctacaaaaaaagtaaaacaaaactagccaggcatggtggcattgcacctttagtcccagctacttgcgaggctgagttgggagaatcatctgagcccaggaagtcaaggctgcagtgagctgtgattgggccactacacttcagcctgtgggacagaatgaaaccctgtctccaaaaaaaaaaaaaatttctttgtttaactggtaagtcaaccttttcgttgtaaatgagaaaacacctatagtcaaaacaaaggctttgactaaataaatataatagaattatgcctaagagtagaatttggttttgtgtctctcagggtcaattggttgctatacttctattccctttctctttcctcacttttaggtaatgatacaaaaaaggtccagaaagaatttgtgttttacccaaaaggaagtttcctctgactactctgattgtgatgggtttgtgagagaaggctgctatttggggtgggagagggtagtatgcagggctgccacatctggttaagtaggttgtgcactttataaagacattgggcattggagcaggtggagcctgaaatccagtttgtgtttaccaagctatattcttattgagtgggactatatcggcccagagcaaagtgtaccgttatctaatttttataaatgtgacttactggctgacagtagctttggtgatgcatttaattgcatttttatttgaaacccagttgtttctgctgtttttgctttctttcttacagataatgtctgttgtatgtacctgtctatgtgtatatgtgtctgtgagtgtatatgcacatttatgccttttatatgccacgtacacacgaaaactccatatattcttgaatgtaaggtcagatattctttgaaaaatatccctcagaaggacggaggtgccctatatgtatctgatttcttataagatactttataatatgagatcgtctttcagttactttgtttgaatagcacagtactgtttggggaaaacatagtctcttgaaacagcctcagacaatgctggctttgagtgcttaaaaaggctgcttcatggaattggaaaagagaagaaacaaagatgtttaacacagatttattaattattgtagagatgatagatcactctaaaaaagcaataccgtaagtggatatgatctcaaataaatgtttacaagatgaataactcttccacatatgctgacattatgcaaatggatacttgtggcttggtttggtatttccagtgatagtaccataaaaggatttacaagctactatgtctcaagcagattatacagacaggcgtttgctctggaaaactgtgttggatgagttgtaagctgactctagtgatgaaaaagacccggttgtcaacaatacatgtgaagagtgaatcaaattgtctcatgaaatgtgagagtgaataaaattatttctaaatttatgcttcataccgtgtgtaatttagtatatatgtaattgactgggtgccatgactcatgcctgtaatcccagcactgtaggaggccaaggtgggaggattgcttgaggccagaagtttgagaccagcctgggcaacatagcgagaccttgtccctactaaaaataaagacaattatccaagcatggtggcaccgctgtagtcccagctacttgggaggatgagatgggaggatcacttgagcccaggagtttgatgttatagtgagttgtgatcacaccactgtattccagccaaggtgacagagcgagactctgtctctaaaagaaaagaaaaaaaaagatgtatgtaatttaattaatatattttataattgagatttgactaatttctatctctaaaagattataaattcaaagttggctaaaatttgtttgtattctcttattggaaaaataagagagtgtcttactttgggttattgcatattcacttatatgtaattattattttcaaacagaaactgaggcttcttgaagagcttgaagacacttggctcccttatctgacccccaaagatgatgaattctatcagcaggtaaggtattttaatatttttatcagtttcagtgatgtgttctgatcaaccttattttacctatgaggaagctgggctagagaggttaaatgacaggtgaaaaggtcaaattagatcacccatgacttctcatggcctacagagcatgtacatttcttcagaatcggctttttgctgtgaatttaatgctttagcatagtgactgtttttatttcctcggacattccacacttccttgcctctgctcatgctgtttcttctgcctagctcctcctccttccttttgctccttatcctgttgcagatggctaattcttcaagagttcagttaaacatcacctcctttgtgaacattttcccagcttaccctacctacaagtcaagttgattgcactcccggtaaataactctataccacctagcacatggtattgcaattacagaattccgtgtctctgtctctgaattagacaccactgtttcaattacaaatgacaaaaacccaaatcaaactcacagtggcaaaaaataaggggaatttattgacttgccttagaagtctaggagtacatggctaaatccaactttacaaaagatgtcacccgatcactgttttttcctatttttcttggcttagctttcctcagtgtgatctcatgctcaataggctctcatctgagagcatagcaggactctgacagcccaaggggtatgtggcctttggcatctgggatcttagaaaaagttagtgagttctttttccctggttccatcaaattatccaggaagtaatcctgttggcctggttggagtcatgtgcttattactgaactagtcatcatgttcaggagagtcaaatgctcctgtttgcccagcctagttcatgcacctactcttggagtggggttggagtgagagtactcccaccaaactgtatgcactatgtgagttagacatgggtggctctcccaaaggaaaatcagagtcctgtttccaaagaaggaagagtaggccctctgggcatgtaaaaataataaattttcacctcttttttcctactacaatgtgaagtcttgaagcagagggttgccgtgaaaatcagaataggaattaggtcacagcatctttgtatctctagcacctgcatgtacatagctgaccatcagtaaccaaggaaggaagagaggaaggaaggactttacccatctagaatccaggtcaatatgatttctgtgacttctagctcaatattatttctaggccactgtctcttatctccattcccatttgatctgcaccatctttcctcttcactgtcagtcctcttataggtctgtctagttttcctctttgccccccttcatccttgaagctatagtattttctaaccaagatgtaaatctgagcatggcaaccctctgcttcaaatcccacatcattgactggctcctacattttcagcctcatctcccctgctcttacaccttttatccacactggatttttgcagtactttaaatttgctatgagtttcatctttggggccttcttgctacgtcctctgctgacgtacctccttctctttatctgtctcttctttttttttattttttgacagaggatctcactctgtcacccagactggaatgcagtggtgtaatctggattcactgcaacctctgccccctgggcccatgcgattctcccacctcagcctcccaagtagctgagaccactggcatgtgccaccacgcctggctaattttttgtatttttgtagagacagggtttcaccatgctgcccagactggtcttgaactcctgagctcaagcgatccacacaccttgggctcacaaagtgctggggttacaggcatgacccaccatgcccagcctgtctcttgtttccttggtgaacttctgtgttacctgttagtaacagctcatatgtcatctcctgtaggaagcttccctgacacctctacaaccagagagttgtctctgcttcctctcatactttatctatacctttatcagcacttaatctcacttaatttttttttttttttgagatagagtctagctgtgttgtgtgcaggctggagtgcagtggcgcgatctgagctcactgcaccctctgcctcctgggttcaagcaagtgcatctggctaatttttatatttttagtagagacatggtttcaccatgttggccaggctggtctcgaactcctgacctcaagtgatttggcgtcccaaagtgctaggattacaggcatgagccatcacatctggcattaatctcacttaattgtaatgaatttttgtgtgtgctggcttcccttatcctctgtacttcgttcagtgccgggtacctatcaggtgctgaatgagtttgcttcaatgcatgcacccaatagttaatttggaaaaccagttatatataataataatgagtttagtatgatttgaattttgcttctacacacgtacacacttccccagggatttggcatctggaaagatttgacagatgtgtacagaaatgtcatactgcatagtgatagggtgggtgttctcttttgaactttcccagttttccagattatctgcagtgaaggtatattcttttgcaatcagggaaaaaataatttttaaaagtacccttaagacaggtaaacccacaaaaatgcaattagttctgaaatgcttactaaattttcatagctataagccttctggtgcatgattacatgcattgtcacaaagcaactgccaagccatttcagcttttgtcgtgtgaaaatggtacaggaagaatgagatacaaaaggttatcagcccactgtgctctgaaccagccatccactgagggataaaaggaaacccaaatgcaaacagaacaactatcaagacttctctgttatctttccaaggcccgcaacaaaccctgatactaatatctaatcactctaagtgcaccttgctgtttttcttttctttttttttttttgagacagcatctcactctgttgcccaggctggagtgcagtggtgcaatatcagctcactgcaacctctgcctcccagattcaagcgattctcctgcctcagcctcctgagtagctgggattacaggcacctgccaccatgcctgcctaatttttgtaagtttagtagagatggggtttcaccatgttggccaggctggtctcaaactcctgacctcacattatccacctgcctcggcctcccaaagtgctgggattagaggtgtgagccactgcgcctggccaaagtacaccttctaggaaggcttagtacttcaataaaaccttagtaaaagtaaacctcttctcttaaaagatgaagtgaaaatactttttaatgacatgagtaaatagaaagttcagacctgacactgggtcccttaaacaggccctcaccacaggaatgccaatccagctgccagtcataaacacaggagtctgttcagcttccattttgggtctgtcgattgatccttacagtgtgctaggctttgtgctacatgttttatgcatgctctcacatgcaatccccacaacagcctcattcattgtattcagcaactacttttcttcaggcttgaggtacttgaggtaggtatttctgttttagaaatcaagagaggaaccaggcacaactgtaagttccacctacttgggaggctgaggtgggaggatcatttgagcccaggaattggagttcagcctgcctctcataacaagattaaaaaaggaggaaatcaggagagactaagttagttatctgagtgggagagctggagttcagcccatatttgtctgactctgaaggcccatgctctttctgctgtattgtccacctcttggtctaccatgctccaattcaaaacaccttcagagaagttttgcagtttcttttaataggaccgtagagaaaagcaaaaccaaaccaccaagggtcaaagcagaaaagcagagagaacttctgttagctcatcatggaacacaaggaaacgaggaattacatagtcagaaaacaaactctgacttccagaaatatgaatgcagccccttttatccaaagaaaatgagaccatcctcagtaacccccttgctgtcactgattgtgtgctagctgtgtgccaggttgttctgctgctactttaagtgcattacacgtgtgagctcactgaaatcttgctatatgcttctgagacaggtgttactaaaaccctattttagagatgaggaaaccgagggacagagaggttcaaaaatttgtttaagacttatgtgcaggatatgttgggactaggatttaagtctgggctgttggcttttgggtctccactcttaagtcctatactgcttctctcttcccttgtgtctcttcatccttctgagataactctgctcttgtctcaaaggttccagacctctgtccccatcccagctctccctgtgacctccagctctccacttccaactgcctacggagtggctctacctgaaagtcttccagctacatctaactcaacatgattcatattcattaagttacttactccattaaacaaatggatttcactccccgactctgtgccaggtactgttttaggcattagaaatgaagttgtgaaaactgacaagagattcgtgtcttctttgagcttatttcttgtggggcaggtgatgtaggagcaagccatgtagatacttgttggaagaatgttctgggcctacagaacagcaaagcctcaggtatacttgacaggaaaagcacccgaggccaacatacctggagcagagggagacagctggtgagagcaggggagacggtcagagagagagagagagagagagagaggcccggttatacgagaacttatagtctgtaagttctgtaagaagagcattggcggttactctgagatgaggaggcatgagaaggcttggagcaaagcgtgacaggatgtcacttacattttaataaggattctttctacaaggctcttcccattcagcctcttctctaacggtatcccctagtcccattcttgagattagaaagctcaccaccctcaacttctatccattgctttcttccctcatttagtcactgggtccctggtggttttacctctttagaatctctcaaattgttttttctttttccatcccacagacactgcctcaactatgtaggccacattgatcactttctgcctccgcagttttagcatcctcctgattagcgttcctcatgccctccccagtgccatcagaactgacttgtacctccttgttttataaattttgttgagtcgcctttgcttccaagatcaagttcaaattcctcagcatatccaccctataaggccattgactttcttgttttttttttttttttttttttttttttttgagacagagtcccgctctgtcacccagactggaatgtagtggtgcggtcttggctcactgtaacctccgcttcccaggttcaagcgattctcctgcctcagcctcccgaatagctgggactacaggcgcgcgtcaccatgcctggccaatttttgtatttttagtagaaacagggtttcgccttgttggccaggctggtctcaaactcctgacctcaagtgatccgcctgcctcggcctcccaaagtgctgggattacaggtgtgagccactgcacccagctgccattgactttctgaccctaaactacctctctggtgtaatctcatcccatggcctaaaatggcgcccaatcataaactctcgtcatagggagttcttggttccaccctgactctgctgtgccctcttatccttccttgcctttgtgcccactagtactctcttcccttttctgtctggtgagcatctactcttaaagactttacttaaacactacatgttctgtgaaggcttcagaaaatcccttctgttctaaaatgtatgaaaaatctgactgcttctcaccacctctgcttcttacaccgtggccaaaactgccatcatctctgttgcaacagcctcctgactggttctgcctccttcccctggtctagtttaacacagcatccggaatgatctttgaaaacataaatcagctcattacactttcttgctcaaagcccttgaatagcttcccatcagcctaggacctgacatgcacccacaaagctctacatgcttgggttcctaactgcttccctcacctcatttcctgcccctgcccactccccaccccccctcacacttttcttcctattctggcactttactcttcctggaataaaccaagctcactcctgccccaaggcctttgcactgaatgttccctcaacctggaactctctcatccccccaggcatctgcagatattgtatccttgtttcttgctttcttctgctctgatgtcactgtatctagaggccttcccttaccaccctgtggaaagtaggcatacttaccccagcactccctatcctactttctcggctttatttttccccgtagacttatcatcatctaaaataccgtatattttacttatttatatgcttattgtctggctcaccttgctaggacatgagcttctagagagaaaatagacgtttcgctctcttccatattctcagcacccaagtgctttgcaaatagtatgtgctcaatacatatgtattcagtacctaagggttttccagcttttccttcccaattattccctgctcccacagcagtatactcacacttctattgtaggacattcttctcttttggtttccattttggtttatactgttaaattatgagatgctgtcaaataggacctatcttcttttaatccttgtatgtctggcactttatacagtgcctggtacataggaagtatttgagaaatgttaaataaacaaaatgaaatgaagtattgaatgaatgaatgaatgaatgaacgaggatctctgtgtcattttgtagcaaagcacatgttacctcaagtcttgtgatagctgtggcagagtctgaacagtgactccagaagtgtatcccttctggagctctagtttgcatcatgcaggcagagtctgggtcagacgagtgtttagcccgttagtcatcggatggctgccaagtcgcaagcattttacaacaaaaattatatagaaaatgagtgatagggtgcaaattgctgagtgcaaaatagaaagtgttaggagcaaaatctattaacagctagattagaaatacagtcctctaaaatcagaatattctagtacttctaagtgaagggtatttcccaagttacttgaatatttaaattttttttttctctctacccaaggttgagttccactgggcttcatttaagtgagcctctggtaaactggtatcttacttgtttaaaaaccatatctgacttccctgtgtgatgaaatctttcagaagcatctcttgatatgggaggaaaaggtagaatttttatataatggcttaaaatagacagaaaatgaagcctgatctccagagagcttagctttccacatctttcagccattgacaaaggcctggcatgctggcattttatatctaaaatacctttccaaatacttattaaactatataatcatcatttatgccacaggatcatttgtgaatctcaagaaatacagtatgtgaccagacaactgctaatataaatttcatgactgcatactcattggaaaaaactctaatgggattaaatgaaaaaaagcctaacatatttgaaaatctgccaacagctgttccaaattattgtgtgatatctgatgttctacatgtacctgtccaaaatggaaagtgaacttatttgtttgacagaatgaattaatattaaattacttaatgttcacttcttctccaaagttacttgttctttttttttttttttaaagaaaaattgaacaaatgcttcatagtacgtttatgtgtcaggcactaatttaattactctataaacaataaaagagggcatttaggttgagatttttttctcttacattttctttgagatagtgacaaaattagccagttattattatttgttttcactgtggtagactgaaaattcctcagtcttgaacaacagatttaaatagtaccagaagttctcttgaagatttttgaccatttagagccatcagaaagaatctcttggcaaatataagaaatgtcatgaaaattaagaatttttttagtgcagcatcttcactctgatttttctgattaaaaatattttacatttatattgggaaatttgaaaataatatagatgtctaaagaagaaaatcaaaatgatgctcaagtacattactcagggataaccaccataaacttttggctatctttttatccaatttttttttttttttctgtgagcttttacatatgtactgtttttcttttaatgaaactgagatctcttgtctatcttgttactaatttcttctatgagtatagtttcctactgacttccaaacagttaagtttgttactttaatattccatcacgtggttgtaccattttcccttctaaacccttcttgggcattttggtggttttcagtttttaattattatcaatagcagtatgatgaatattcttataatcttggtgtgtttaataacttccttatgacaaattcctaaaagtagaataactgcatgaaaagatatgggcatatttaggttctgatagatcttgtccaattggccttaagcaacattgtaataatttgcattcctaattgcacgctatcagaatattgaattttgccattatcaacaatatgtattactattataaaatgttttaatgcaaatttgatagacagtaactaatttaagtataatacaaattatatattttccaactttgatacagttaatatttatttatttatctatctttgaaatggggtctcactctgtggcccaggcttaggctcacttcagcttccacttcctgggctcaagccatccttccacctcagctgcccaagtagctgggaccacaggtgcatgccaccacacctggctaatttttttgtattgttagtagagaggggatttcaccttgttgcccaggctagtctcgagctcgtcagctcaagcaatacacccgcctgagtctcccaaagtgctgggattacaggtgtgagccaccacgcccaggcagttaatttttttatgtgctaagaggcttctctattaatttgcttgtgaatgggtgtgtgtgtgtgtatttaaatttttaatggttctgcattaatgtttctgcattcctgccatataggttgtactttttttttccagtttgtttgccttttaattttatgatttattttatacaaaaatttaaattttcagatattcacatctatcaatcttctttttcaaaaagtttattgattaactgtatatgtgtataatttacataccataaaatgcacgttttgaaattgtacaattcagtgatttttggtaaatttccagaggcatacaaccatcatcacagtagttttagaacatttttagcaccccaaaaagatctctcatgcctctttacatttagttttctttcctgccccagccaagatctccactcatctgcttcagtcttttaaagcttttattcttagaaaggagtcttgagcacttatgtggaaccaagtgatgtggctataacagatactaatgctattttcttcttcttctttttttttttttttgagatggagtcttgctctgtcacccaggctggagtgcagtggtgtgatctcggctcactgtaacctctacctcccgggttcaggtgattctcctgcttcagcctcctgagtagctgggattacagatgcccgccaccacgcccagctagtttttgtatttttagtagaaacagggttttaccttgttggccaggttggtctcgagctcctgacatcagatgatccagctgcctcggcctcccaaagtgctgggattacaggtgtaagccaccgctccaggccactagtactatcttcttttaggagcttgtgatcttacaggacagattattaaactaataatagtttaaataaatatagttacaaatagataagtgctacaaaagagaagtaaagcgtggggagtgataacagagggcacctatttgagggtggagattcaggaaaggtttcctttttttttttattatactttaagttttagggtacatgtgcacattgtgcaggttagttacatatgtatacatgtgccatgctggtgcgctgcacccactaactcatcatctagctttaggtatatctcctgatgctatccctccccctccccccaccccacaacagtccccagagtgtaatattccccttcctgtgtccatgtgatctcattgttcaattcccacctatgagtgagaatatgcggtgtttggttttttgttcttgcgatagtttactgagaatgatgatttccagtttcatccatgtccaggaaaggtttctataagaaaatgacccagggatgggaaggaccatccaggtgtggagttgggggaggagcctgggggaagtatttaagagctggacacttgaggactgcaggaatagaagcacatatggtcagagagaaaggggacatgatctgagtgggaaaaaaatggaatattttcccatgccattattttctttttatgctgttttttatgtcaaggtatttacagatgatatttatgtggttatatgtttttcctggtctatagggttataatttccccatattaaatatatcttatgcagtgttgagacccagtgtatgttgaataagggcagcagaattttaatggggggtgggcaggcgtttgtgcatatgagtgcattattttcagtattcctttcttagtcccagaggggagtgtgttcagaaacagagttcttgggaattaccatacttttctttattgttttatactaaggaccattcagagagtactggaggtgttaagacagtgtgaagaaattaccttcttcatcacttcttcatcattgctttgagtatactggggcctcagggacttgctaagaaagtaaccagtatagtgatagaattagagttgctgctcatggcttcagaatatttggtctctgcttacaggattgcattgctttcttcataagctatgtaaatagaaagtacgatatcactgtttctgttttccaatggggataactaaaatatggaaactcaatccttaatggatccctgacaatctcaatgacaatccatagtggtatgccacatgactcttctctttgtcactttcaattcatggtcaacacctcagataggcattttgagaagcagggcagtcctaccacacttacctagtaaagtcattttttcacattcagacttgactcattcatttttcttctgcatacttcctcccactttctgcatgtcttctataatatctcctgcactctgcctcattcagaacaggctagattatgctatagtaactgataactctcaaatctcagtggctccacacaataatatttcttgtccattttatgtatcatttgtgggttggcacagagtcactacccattaaagtagctcagagatccaagcagccaccagctggttgctgtggcagaggggtgcagagtatgctggagggtcttgcagtgacaatgacatgttccaggctggaagggatggccatcatttttcactggacagaagtaatcccatgtttcatccatcctgaggggaccaggaagtgtaattttacactgggcccaaaaagctgggtggcagaggaggaatccagaactatttggcaaacagctctaatgaccagcatacattcttagctagtgattcaccttaacttcattgagaaagtcagagcattctctaactaccacccctccaaaagaaaccctagaacgtactcatctgcctactattattacatttatcatcctatctgaattcataccttctttttccttctagcctattccaatataagaagtatcttctctcctatccacatatttttgatcacatactcttatcagtagataagcacatacagtgacatcctagaaagtgtttaacaagtggcctgtagggggaaagaaccagccttgatttttagtgttttttgatttccgcagtgtaaatactctcactgtggacagtttcaagccaccgtcacggtgttactgaatgtgcagttggaaagagatgcacacagtgggctctcatgagccagtgtggactgactccagcacaccaccagtagtgtgctggtggtagtactcatgtactcgtgtctgttttataataatattcatattaaacctatttgtgtgtatatgtgtgtgtgtatatatatatatgcatacatattttaataatgcttgagttctttcattttatattaaaaataaagcagttctacctctcccctgtgccccaccactcttccagatggccttacaaagccttgcatacctgacttgggggctactgctctagacactcaaggtctcgacttctttggttattcactctctctgcatcgtcagcctctttctcttgtatcattctcatgagtgtactgagaaactctggtgttctctagcgtcttccatcattagagattgtcccttagtctagccttcttctttatcaaaagctccatttttctactccccttcatagcagaaccattcagagacatctctacatgccatctcacttcctcctctttcattccatcttcgcctactccaatctgactttcacccccagcactctactgagattgctcgtgtcattgccatcagtgattttcatgctgccaaatctactggatcatctgtcttcatctcacttggcctctcagtgtcaggtgacatagttgagtaccccgcccttctagaaatgctctcctcttttagcttctgcaataatacactctgctggttctcctttgttgaggcttctgctgcgactcaggaaatagctttggtctccttttgatatttgtactgtttccctaggtgatctcattcatttctaggcctttaaaaccaagctgtgtgctgatcactcccacattgcgttcctctgccctgctttctcttctgagctccagatgtgtacatccaattcccctccccccgcccaccatattttcacctggaggtttcataggtatcttcaaggctgcagctctacagtgaactcttcatttcccccttttcttctttctactatttctcttttgcctcagttttccttatttcacagaatagtaaattgtttatttagttgttaaatccagaaatctggaatgtattcttaacttctatcctgagcaacagggagaaaccccgtctctactaaaaatacaaaattagccaggtgtggtggcgcatgcctgtaatctcagctactcgggcggctgaggcaggagaatcacttgaacccaggagtggaggttgcagtgagccaagatcatgccattgcactctagcctgggcaacaagagcgaaacgccatctcaaaaaaacccaaaaaaccccaaaagacttatatctttttttatcccttacatctaattcataagcacatcctttagttctacctacaacgtatgtatttcatctgtccacttatctttgtctctattttagtccagaccatcacttttcttccagatgattgtaatagcacattccacgctcacatgtgcctctttccaatctgtgcctgatattataactaagagcgattgtataagatgtaaatcaagttatttttctcccttctacatcctccagtgcatctagagttagcttcagattccttaccacgacctctagggctatgtgtgatctggcctccgccttcctctgcctcctcgtagcatgccactctgtctttggctcttgtgctctagtaaaacaagcctttttttgtccctagaataggttggtctttttcctgagtgcctttggcttctctggtctgtctttctgggaagcactttctctggcttgtcatatttctggtgccttcttttcctgaagatctcagcttaaatcccgtctccttagagaattcttcctgttctaataagatttcctgctggtttgtttctgtcttagtacttaacacaatttggggttgcttttctttatttatttacttgatttggtagaaagctttgtgagaacagggaccttgtttccatctggtggtaggtgctcaataaacagatgctgcatgaaaaaaaaaacgtttggaagaatactggtcttgccctgcctatcatgtgaatggtaattactaaatgaagacagagaaggaaggtatcttaacaatggtgggcaacacaatacagggaggacaggttaatgtgttgatcatgtctgactctttctttaagacagcctaaaactagggaggaacaaatcagatcaaacgttacagaggtaaatgtaaaatcctgtgatttggttacaaataaatcagttgcattttacagaatcaggaaactccagtctgacaccgattcacatgccaagtcctaaggaaagtggtagccgaaaagctaatgcagccctaacctacattaatcattccatgtatttctgtattagggaagggaattgaccaatattactctcctccagtgacaccagtagaattattagaattttgtagaattacaatgtaataatacctcattcatccatgcacaaatccatttattcattcctttaccatttactgagtaaattctgggcactcatattatagtcatgagcaaaattgccatggcttttgtgttcatggaacttaatgtctaactcctgaagagaagtgagttctctttttgtgaaagtgttaagcagaaaccagtttgtcatttattgagacaatgcattctcatggttaagaactcgtgccctggaagccaggggttggtgtccaggggctttaaattccagctccagtatttgccagctgtgtgactttgggcaaattaatgtctttggtcagattaatgtctctgtgtttcagtggtctcatctataaactggagataataatactatgcctagagttaaaatgagctaatgcacacaagtaacttacaacagtacctggtacgtagtaagcacttaataaatattttagataataagcagttaataaaatggtgttgagatttagggtgagaaaaagtggtcacagaataatcctggtgtatcaggacacacattattattttttgttttttattaaagattgttagtaatttgagcttgaacttgaaaatcttgactttagagtttgatgacatttgttttatttggttttctgttttgggctaggaagatgtgactcctatttagaaatagccaccaggtagtccccccacaactccccaaatgcttacaaagaaacacacctttggaaataatacaattgtagctatatatcaacgtctgtttttgctttggttttgttttagtggcagctgaaatatcctaaactaattctccgagaagccagcagtgtatctgaggagctccataaagaggttcaagaagcctttctcacactgcacaagcatggctgcttatttcgggacctggttaggatccaaggcaaagatctgctcactccggtatctcgcatcctcattggtaatccaggctgcacctacaagtacctgaacaccaggctctttacggtcccctggccagtgaaagggtctaatataaaacacaccgaggctgaaatagccgctgcttgtgagaccttcctcaagctcaatgactacctgcagatagaaaccatccaggctttggaagaacttgctgccaaagagaaggctaatgaggatgctgtgccattgtgtatgtctgcagatttccccagggttgggatgggttcatcctacaacggacaagatgaagtggacattaagagcagagcagcatacaacgtaactttgctgaatttcatggatcctcagaaaatgccatacctgaaagaggaaccttattttggcatggggaaaatggcagtgagctggcatcatgatgaaaatctggtggacaggtcagcggtggcagtgtacagttatagctgtgaaggtacagtctgctcttggaaaaagcagccctgtatgtaataatatgacccgagttgtttaggctctggagatacacacgcatatacatgaacatgtttgcatgtgtgcttgcgtgtgtacatgcacatgcgtgtgtgtgtatcatgtgtcctttttagtcttgtcacacctgtatgtctgcagaatatgcctctttctcatctggccatgctagctggctcattgttatactgtactcagaatattttcgcacgtaagcactgctgtcatttgtctctcttgtgcccaggagagcagcctcttggtttcatacagccgactgtcttctctacagctcagaggagattgtacagttgctataattaacttgctgataaagagctgggaaaacaaaaatctgtcaaatctttccaggttcccacaggtgcacatttccagacctgccaaaatattttattatggttgacatcactatcttgatgggtgtgatttgtcaaatatggacttgttcttggcttcctatagtttgtaactactgtccttccttgccagaagcagttgaggtaggttttgtaagcagacagtcctctattttcaggaaactccctagctctttacccaattctgcagttttagaccttgttgggtggctgtggtagacttgttcttgcattttctgatgtataatccccttgaaacagatcgtaggctacctcttagtagcccacccacatttctcttcttctattattgtttctgtgtgtttatggccctcatttttccttagaatagaattacaaaaatggtagttgaacagatggaggagagcatgacctctgttgactttcttttgtgtctgattatttggcaaagggatacaagacatagtattagctctcctgtctgatttactgaaagatgtttggaaaaccagaattctggatatcccatcagggaatgactggaactttccagggtcattattttctgacaactctagttatttgattggatttttgtttgttgttgttatttgtttactaaaattactgttttggaaaagagatttaagaaaaaaaagatctttaaagtactctttaaatttcttacaatttcccagtctcaaaaatttcctcagaactactaatattttttctaactttatcttatgtcttcagtctgaaacaaggaactagtttagcatttggaaatttcaccactttctctggcatctcaaataatgatgctgacctaagaaaatcgcttgaagggatttaacgctgtcctaatggaaagaacggagatcctctgatctttaataaggacttgccagggatttaagaactatcacatccaagaactctgatgtgaacgaacaatggagttagtttctttcttaaggagacaactctccaaacctgaagcagtggtatgtgatagtacaaagctctacaaagatgtctttgtgctcccaattactctgagccctccagtttaatagtcctattgtactcccttcccgtgggtgatcaagtagtttttgaaacctagaatatctttcagaaaggaatttaaatgtctaatgaatagtttctatgctcaggagtaattaagactgacaaagtatacaaatataaattacatataaatatagaaatgttggtacttaaagagggaactgtagaatttgaatctgtaagagcggtgtgcaaactcctttgttctcttttttttctttttttcttttgagacggggtctcgctctgtcgcccaggctggagtgcagtggtgcgatctccactcactgcaagctccgcctcccaggttcacgccattcttctgcctcagcctcccaagtagctggggctacaggcgcccgccaccacgcccggctaattttttgtatttttagtagagacggggtttcaccgtggtctcaatcttctgatctcatgatccgcccacctcggcctcccaaagtgctgggattacaggcttgagccaccatgcccggcctcctttgttctcttaactgcagaaattctcagaactccatctaataataatagcaatactgggaatgctcatttattgagcacctactacgtgctacatgctgttataagcattttacatgcattaactcattttgtcttcccaacaattcaaagaacaaaatagtaatgaagtactattgctatcctcattttacagatgaggaaactgagtcacagaaggttgattaacttgttcatggtgatgcagcaagtaattagcagagttaggatttgaggacaaatatccaggcttcagaatcttaacacctaaggctatgtgcattatgagcaggtatttcttatcccagcagtgtagccgtctcagggattttattttattattttacttttttaattttttgagacagagtgttgctctatctcccaggccggagtgcagtggcacgatctcggctcactgcaacctccgcctcctgggttcaagtgattctcctgcctcagcttcccgagtagctgggattacaggcatgcaccactactcccagctaattttttataattttagtagagacggggtttcaccatgctagccaggctggtctcaaactcctgacctcgtgatctgcatgccttggtctcccaaagtgctgagattacaggtgtgagccactgcgcctggccagggacttggatttttaaaatgtccaccttctggaaaggttaaggggacattccacttgctttttctttcaggtcctggtgtcttcctttctccagctttacttctcacccacatctgctgtagctttccagcacatactctcagatgattggaatgcatcagattatcttattcgatgaaacagaacctttctgtaggtgtctggctgtgtgtcagacggcatacaaagcatgtggctctgggtcagatggtgtacaaagcatgtgccttgaaactctatggtgggcgcatgtcttctaagtgacaagtgatatctgtttagttttctggtcttataatccttggcagaatgccagaactatggcaaaggtggacttgaagagaatcatttggtttaaaattttggttgaggttgagaagggcttaaggaggtcatagagagtggacacttcagagaattgtatttttttctgtgtccttgaacttgtttgtcaatgagctgttctagacagtatgggaactccaaagataaatcaatggctttctcactttgaggtaatagggaggtaataggtgggctctcgtgattataattatgaaatgatgaaacattgggtttgaaagagacttttgaaatcacttgattctagcctttcattttacaaatgaaaacaccgagaagggaagtggcttggccaaggtcacattgctacttagtgataagagcagggatttaagttggaaagtgttccttgccactggagaggttcacgtaaaatgcactgggaattcagatacagaagtgattgcttcctgctgaaattaaattcagttgaagcttaagatctttcaagactctgctctcaataccttttcccagggaaatcttcttgtagatttataatgagccagtcatccctctttggtttattttcatgagtagaggtcattgagaagtaatttgtataggatacgtgtaattatatactaaattcattggctttcacatgccgttctagttaatagatatctccagtaggaagattgaaatggtacaatttttaatcaggaatggcttcggggaaccatatgtaaataggcagaatatttgattttcctattccagctttgctggcaattgcttgttactcctagctataaaaaacgaactttagcggggaaggcattaaaaacccaatgtttaatatggtccagcaccttgttctttgactggaacaccttcagaaacatcacttagatcaacagtaactattggctaccatttttgtttctttgtctggaaggaaacattttctgtgaaattgtctttctagaaagaaaagcaattcttaagattttaaactagtgccaagtattgcatattcttgacattattttccagacctcccacaaggagccaggaaggcagctgggcgcggaggctcacaactgtaatcccagcactttgggagaccaaggcaggtggatcacaaggtcaggagttcaagaccagcctggccaacatggtgaaaccttgtctcttagaaatagaaaaataagctgggcatggtggtgcgcacctgtagtcccagctactcgggaggctgaggcagtagaattgcttgaacctgggaggcagaggttgcagtgagctgagattgcgccactgtactccagcccgggcgacagagtgagattccgtctcaaaacaaacaaagaaacaaacaaaaatccaaaacccaggaaggctcacaaaaggaagaaaccgatccatgtttcctgttgagcatgtgataggctggaaagtagagactttgcaataatgttcttggaattctaggatttccattcatgtctttgatttgggaaaaattgcatccccttaaggatggaaatttgttcccgtaattcttgaatctctattttaacatgacttgctctatatttctcagctcatcactgagaccatgaaaagctagtttataattacagcttggagttttggagtattcataaaaacgctgtgatgtttaatgttatcttagcgtcccagcatccctgtctaaaatctcaaagcttatttgacctagcttttttttattgtatcatgctatgccttgtcagtgatttttgaaatcacttatactgctcagtaaaacttgtttggtcttataagtcacatttttgggggtgaccatccagttatttattcatctaacaataaggtctcccatgaagagccaagaaggctcacaagaagaccaaagggggggaaaaaacttatttgatctacaaagttacatttttttcatgcctatgcaattattttttcatttaacaataagcatctactatttgctagtcagttgtctagatgctgagcatgtatcagtgaacaaaacagacaaaaatccctgccctcatcaagctcacattctagcaagggaaaacagaaaataaaagtagattgtgtaacaagggtgagggataatcttacaattttaggtaggagagccaggcaaggccttgttaaaggggtaacatttaagcagattggacggagagaatgagccactgagaaatttgaagcgggagcacataggcgggaagatagaacatgattgggatgtttcagaagcaacaagtgtggatggaatagagtgagagaagaggaaatgaaatgaagacaaagggacaagtaaatgggtggcagaaggtagggctttgtcatgttagaatacaaagtagtaggtttggatttggagtgagatggggagccactgaggagtagaagaagggaagcaacaccagaaacaggagagctcacagaggtgaccaaagtaatccagactagggatatgatggtccagatcagaagaggcagagcaggggagaaatgtgtaaatacagtcctgtaactttttaccaacaaagagagtggcagtgtttcagcaccagtgagaaaggataaccagcagtggcatctcccatttgtcaagagaaggctaagcctgtaagaatggctacattttctcccctctgtgaatggctttattcgggaataactgacatacaataagctatacatattgaacatttatagttttataagtttcaacacacctgtgaaactatccccactatcaagataatgaacatacccattattccagaagtttccttgtgcccctttgcaattcctcttcctgacatatctgttttctttttttattgttttttatttgtttgtagagactgggtctcaatatgtttcccaggctgatcttgaaatcctggcctgaagagatcctccttgctcagcctcccaaagagctggaattacaggtgtgagccactgtgtcagcctggatttgttttctgtcactagatgagttggcattttctagaattttaaccagatggaattatatatgtgcacggtttttttgtctggattctttaacttagcatagttattttgagattcatccatgttgttatgtatatcagtagctcattcccttgtatccttttttatttcaataaaatatacataaaattaatcattataaccatattaactgtacagttgagtggcattaagcatcatcccacaccaaatctctgtacccatttaaacaattactccccatttctccttccctcatttcctggtaaccactgttctgctttctgtctgtattatatttgactattctaggtacctcatgtaagtggaatcatacaatatttgaccttttgtgtctagattattgatatggttcagctgtgtccctgggcaaatatcaacttgaattgtatctcccagaattcgcacatgttgtgggagggaccaaagaggaactggttgaatcatgaggccggtctttcccgtgctattctcatgatagtgaataagtctcacgagatctggtgggttcatcaggggtttccgcttttgcttcctcctcattttctcttgccactgccatgtaagaagtgccttttgcctcctgccatgattcagaggcctctcagctatgtggtactgtaagtccaattaatcctctttttgtttccggtttcggatatgtctttatgagcagcatgaaaacaaactaatacaactattttacttaacatagtgtcctcaagattcatccatgttatggcatgtatcagaatttaattcctttttaaagatgactaatattccattgtatgaatataccacattttgttgattgattcatccatcggctattcataatagccatcttttggctatggtggataaagttgctgtgaacaaatatctctgtatacaaatatctgtgggaatctccgctttcagtacttttgtgtgtatactttttttgtgtatatacttttgtgtatgtacttttgcgtaggattgctggatcaaatgataggtctatgttgacatttttgaggaactgctgtactgttttctacagcgactgaactgttttatattctcgctggcaatgcgcaagggctctaatttctccacatctacgccaacacttactgtttcctgttttttgataacagccatcataatgggtatgaagtggtatctccttgtggttttgatacacattttcctaataattaatgatgttgaacatcttttcatgttcttagccatttatatatcttctttggagacatgtctattcaagttgtttgcccatttttgaatttggctggtttttagttgttgagttttgtgagttccttatgtattctagatattaattccttatcagatatatgacttgcaatattttcttcaaggatagctgaactttttttttttattttttttgagacggagtctcggtctgtcacccaggctggagtgcagtggcgcgatctcagctccctgcaagctccacctcccaggttcacgccattctcctgtctcagccccctgagtagctgggactacaggcgcccaccaccacacccggcaaattttttgtatttttagtagaggtggagttttaccatgttagccaggatggtcttgatctcctgaccttgtgatccacctgtctcggcctcccaaagtgctgggattataggcgtgagccaccgcgcccggcctgaacttttgatgatatattaatgtgatgagcacgggatcagagaacagtggaatagactttactgtccatgacattgatgaggcacttaaattctatactactgaatgacatcattcatattggtattaattagctatgggaccttaagcaagttacttaaattctttgtgactcagttttctcatctgtaaaatagtgatcagagctgtatccacctcaagattgtgagaattaaacacttgtaaagtgccaagaacataacagcagtaattagcacatagtaagcattcaatactgtgttatttttagtttttatcaaaattattcattcatatcatttttacaagtcaaatatttttataaggtttgctaaggaaaaaaaagcaggagtttttacaccttttcttcccattttcatttccacaggcaatcatttctactcttttctttcaggtaatgcttttggtagttgataacatacttacattgttttgaacattatatattggcttcctgatatggaaggtgaagatttacctagctctcttctttctccctgcctgcctacacatgtacacgcttctgattcccattatagatttactgtaattttgattatatcactattcagcctttatagttatcatatatatacatgagaatgccttccaaaacctgtgatctgttatccttttcttttcaacttttttcttgcattaatggtagtcttgctttttgtgtatttgtatagttttctatgtagttatgactaattaaatcccttgctatctaccacatctcctcttaagagcttcagaaccatcagatattctgtccatttcattttcttggagcactgtcttccagagtcttcttgtctgctccaatctggtgttctatgcctgatgcatggggatccctttctgtgacctcttcattgtaatccagcggattcctttacttctctcttttgtgaactcctcacgttcctgcatcctggccttgctctttcctgactgttttcttattttggtggagcatgtcctacaatgttttcttcagaaagatgcttaggaggtaaatttttaagaccttaaatgtcttcaatcatctttattccaccttggtatatgtaggttcttccagtatgaaaaccttgttaggaaataatattttttttcagaatcgtagtgacattgcattactgtcttttatcttacagtgttcattttaagagttctgaatttttcttcagcttttatgtcgctttttttgttggatctttttttgaatgttttacaatttcacagtgatatttttcactcattttactgtcattgtgtagggctttcaatcatgcccttcagttgttggacattttcttgaattgctttgttagttatttcttcctctccagttttctcatctctttggaatccatatgatttagttaaccttctggactcttcctctagttttcttgtttattcccttattttcaatctttatgtttgttttttagtctaatatctgggagattttattaacttccaacctgtctattgattttttttttttttttgagatggagttttgctcttgtcacccaggctggtgtgcaatggcacaatctcagttcactgcaacctctgcctcccaggttcaagtgattcttctgccacagcctcctgagtagctgggattacaggcgcgggccaccatgcccagcaaatttttgtatttttagtagagacaaggtttcaccatattggccaggctggtctcgaattcctgacttcaggtgatctgcccgcctcagcttcccaaagtgctgagattacaggcatgagccactgcgcctggcctgtctgttgaattttcagtattgaaatatgacatatatcataaacatacagcttgaagaattgctgtaaacatatctgtgtacctagcaccctggtcaagaaatgaaacatatcagcgtcctagaagtgctcccttccagtgtctgcttccccacaacagtaaacactctcctgacttctaaggccataaatagttttatgtgtgtttgaattagacttgtaaacttgtaagctcctaaaagaagtaatttgtgtcttcatccttctttgtatccgtatatagtggcaaatgagtattttttgccccaaatctgttaagtatttgttgttcttgaggagcttgtactattcagttacattgtggccactgttcagtaactctttgatttctgcaactgcagtctctgtttagtaataggattcttttgatagcaaataataattccagacccaaagaggcttaatttaaaaaggtaaggaattctctcacttcatcctaagaactggcgtctcactggcttcaagtggaccttgttccaacagtaatgatgtgatcagtttcaaatttcttccccttcctcttttggccattctaaagctcatggcccccaaatgactgcccccagcttttgtggccactctctctttctttttcctgagctttggggaggagagaaactgggtattgggtgtgtactttgaactctggatcaagctttacctgaagctagatgaacaaataatgaccctcttttgattaacccagttcggttctggtttctgtgttatttacaacgtaagggtttcctgtgagtctccacaactctctttataccttcctgaggttacccaaggaattgaaacctctactgttagaagctctggtttggagaatattgtttgagaagtatctctgcttccttacctgatttcatattttacttcagataatatagtgattttgaagctttagctaatggcccgcatagcagtttttctctccttttcatactttcaatttttctcccaagtccgtgaaacatgatgtaatgaggttctcctctgtaatgtaaatatttttatcttaaattttttccccaaatgcttaatctgaaagctgacagagccagacatgatgttgaagggctttagatttttctgtaaagagttttcaatatttcacctgaaatcctagaaaacttataattaattttacaatttatctgtgtcaagggactatgtttgtcttgaattgcttgtttcgaggcatctgagagcggcttcttgttatagattctgagctgggaatgattagtttgtttttttttctcaccccttcagacttttctaaattctccattttttcagaccattcattgctccgtggctgagaaggagtatgtgctgtgtcagcagcaagcttttcttgcaacccgtcaaggaaagcatttctaaactctagaactctggcagggaggcttctccttggctaatctttctttcctagtgatgtagtccatcagctgtgtttcctaaatgctctctggcttatacagtacccatttgttgctacgctgggaacgtgtctagaaaaagtgtagtaattatgcacgaagaagctggtaccttctagagagatcattctgaaaacagatctgactggtgaaaaaggctttagtgtctgtcagtagtctcagtgtaagttctagattctttcctatggttcataaacccatgtcctggtctccacccacctctccaggctcttctcttgcaagtccatgccattcatgtgacactattgcagctgggaattgattgtgctcttatacacacaccatgccatttccctcctagaatgtgccttccctatgtcacactttccccttttgccttctgtctcctttcgttctacaaaatggatttcccatcccagacatgggaatgtcgaagatcagcactggacagatgaggcatcattagactccatggtaccagctggccatctacaacttgtgagtttctcctgcctcaagatctgtgacatggatagcaagggaccagccttttaaagctcctccaggtgtggagttaaggaaacagaggaagtaatcacaagggtgggaatcttcttttttgagatggagtcttgctctgtcacccaggctagagtgcagtggcactatcttggcttactgcaacctctgcctcccaggttcaagtgattctcctgcctcagccttctgagtagctgggattacaggcatgtgccaccacacccggctaatttttgtatttttagtagagacgggatttcaccatgttggccaggctggtcttgaactcctgacttcaagtggtctgcctgcctcagcctcccaaagtgctgggattacaagtgtgaaccaccacaccaagctgagaatcttttgtatcttagctcttggctaaggaaatagaaagtagagaataagaaatagggctgtttttaacaaaaaattagccacgtgtggtggcacatgcctgtaatccccaccactcaggaggctgagacaggagaatcacttggacctgggaggtggaggttgcagtgagccaagatcacgacactgcactccagcctgggcaacagagcgagactctagtctcaaaaagaaagaaagagggctatttaaatgtatggtgatgatgaatatgtactgaacctgtgagggaagttcttgacatacactattatgtatgttattaaatatggtacaaaattttttgtgatatattttatttgagtatcactgtaatctctactgtcatactctggcttctgtctttgtttcctgtagagccgtggttataattagaaatgtaaacaaagtattttgtgctttattaaatagaattttttctcaaaaactagctggcataaaacattgaatgggttaattttggggggaagttttggacaatttaaacttgacttttaaacttaacagtcttttgtatgttgtcacatcttctacttatttaacagtttggttagtgggagctgggagctgggagtgcaccaaacacactgaggtacttaaaatcttttcaattttattgaggcttaaaggcaagtaagaacctgttgcctctgcttgttgccaaaataacatggggcaagagtaatcagttacagttgctataggtaattacaagttgatttcactgagaagtaagaacactatatttaacaataaaaagtttatcagacgtgaaactttcctcctccctacacagcctaaggaggggaaaaactctcaccaaactatcattttactgagcagatttcaaaggtgttggatttttgggagacatcgagaaagactaattgcaattattgtctctaattgtctttattgatgccagcttgagaagagtaccaggatgaaagttagaagggaaagtagtcaagcagactgttaccctatgaagattcccacttattagactgtccacacgcagtggcattaaaacttcataaaaactgttccttacagtttgaaaattatttttttcaagtcattataattggttttctttttttttatttatttatttatttatttatttatttatttatttatttattttaaggtgcagtgtcactatgtcaccaggctggagtgcagtggcgcgatctcggctcactgcaacctctgcctcctggattcaagcgattctcctgcctcagcctcctgagtagctgggattacaggcacgcaccaccacacccagctaatttttgcatttttagtagagatggggtttcaccatgttggccaggatggtctcaatctcctgacctcgtgatccacccacctcagcctcccaatgtgctgggattacaggtgtgagccaccacacctgggcctttttatttctttttaattttgtgtggacttcaatggtagaagttatagttgatttgaccagaaagggacatgtgaaaaaccttcctaaaatatttcctttttttttcttgtgctgtttgctctatctgtaatcattagtgcccccctagaatgaagcagccaagtcttgggttatcacaaatataaacataatttttatatcatattcttttgctaaggtgatctggatatcaattaatttagcattaattattatactgtatgctgtcattagtcatgttacattattaggtattagtcacattacatcataattattttatgcagcctcaacttctttactaaaatgtgcagtagacatcagatcacaaatatcaagactttcgaacaggtgttggcaaattttttttgtaaagggccagaaacaagtacttttggctttgtgggttttatagtctgtgtcttatctactcaaccttgctgtctgtgtgaaagcagccatttatgtaaatgaatgggcatgactgtgttctagttaaactttattttgcaaaagcaggtcacgggactgatttgcctgtgatctctgcaacccagctcttgagtaagggtcacagactttgctgtggttaggcaggtacctcaaatgagtaaagtgaagtggctgtggggactgcgactagcaaaggtcacgtccttgtctaaaatgggcagctacttcttccctatagccactgtgactggctcagtgataccagatcttgtaattcaagggtagctgggaatttggatttttaggcaaagtccttttatcagttggcaactcatttagatttgttaaggaaatatggttgaggtcaagctacacaccttcgtgagttcttttctggtccatgaactccagtttagcaaattctggtattttcaagtgtaacagtatattatgtatgaataagaagtgcctgtagaatgtcatcagacatcgatagcaactatctaatgctggtgctgccactcactaacccttgtagtgcccatgacagacatcagtaattgatcataacactctttcctgctgagctaggagaaagtttcagatttcttctccactagggctctaaaaagccgcaaccagccaatcagtcatgtcccctgatataaaggtatttatcattctcattctagaaggtttataaaaaatgtttttttaattaacctaggaaatggctttggacttttattgttattctgttaaaaaaacctaattaaaagatgttcttaattaaaaagtactggagaaaacatgtattagaatggcaggtatgaaaaaaggtaagatactgttaatatggcagtgttagatttcagaccaaacttaggggaaagagtatccaaagtcagatgtatccttaaaagtcacttagcagcattccttccttgcagagaccatgaacttggctttctgatgtgttcattttcaccatgcctagtgcaaattaatgtgaatgaatagttacaaaggggagtttctttttttccttcctttcactgcctttgacccttctgcacatttggcggtagagtacgacattcagaatttagggattctgtgtgtgccatctgggatgcatgtattttttaaattgtttatgtgatatatacatgatacagcccagggaaaacatgctttattgtgcattttgaaagctttgcatctttttgtcttcctgcattacttctcattttaccctctgccagtctaaacactgttgtctttcacgtttgaccttctctaagagttctgctctagttctgtcgttgaacctctctcctctctaaacttctttagtactgaggactgtactagtttagcagcaatgccatgctttcttatgtcctttggttgtaaatttgaggcatttttgtttttttcttccaaattaacattttctttccctgccatctagcacaaggactgtgaatggagtgaactaaaagaacattttgtttaagcaagccatggtgttcattgaatgccttctctgtgccagtcactagggctataattgtggatgaaatagaaaaacagactctgccctggaagatcagagtctagtacagcagtttaaagtgtgatggaatttcaatttaaaatgtccccttcatggtaatcagtgatgcacatttacagctccactaaaaggagaagctccagtggggcatagctctttgtttcagtcactgacatatcccacatgcctggtgcaatgaccagtaaatagtaagtgctcaataaataattattaaattaacttttaaaagtttttatgtagagttattcctgcagggctgtgattataggcaaatcatagtgtgtataccttctaccttttttagtgtatctcccactcttgtaccccagaaaaactagtcttgagtatccttccagaaatgttgtattccagtcttgtgtatccttccagaagtattataaatattatattattatccttccagaaaaatcagtcttgagtatccttccagaaatactatatgtgcttgatatttatttatttatatttattttgaggcagggcctcactctgttgcccagaatggagtgcactggtgctatcacaactcactgcagcctccacctcccaggctccagcaatcctcccacctcagcctcctgagtagctggagccacaggcacgtgccaccatgccccactcatttcttttactttttgtagaggtagggtttcaccatgttgtcctggctggcctcgaacttctgagctcaagcaatcttcctcccttggcctcccaaagtgctgggattagaggtgtgagccactgcgcccagtctgtactttgttttctatatgagtatagcctatttatttttttctctgaaaatatattagatagttccatatctgtatatagtcatattatttttggtgactacatagtattttattgtctggagagatcataatttatttaaccagaaacctactgatgaacatttgagtaatttctgatcttttgctcttacaagcaatactacaataaatatacttgctcaacagtcattttacaacccctgaatgtaggacttttagtatacattcttaaaagtgtaatttctataagagtcaaagagcttatgcgtttgtaattttgatagtattgccaaattgtcctctacagagagtgtgagtgtgccattttactgtactcttactaacactgtgttgttttcaaactgatgttttctgttttgataggtgaaaaaatttctctcttttggctttaacatgcatttcttttatgtgaataaattggaacatatttttatatgtttatgagctagttttatttccttttatgtattgtgcctttataacatgctcagttttaaatttgtctattggcctttatcttactgatgtatagttgctctttatatatttagaaaaacattccttggctgttcttgcttgtttatatttccatgtgtattatagaaacagcttttctagttactaaccccattcatctaaaaaatgatccctttggtctttttatttatattatgtccaatttctagatgaatttagaaagtactgacatttctgtgatgttcagtcttatttcctaagaacataatttctctttacatctgttttttatttttaaaaagtaatttttttttttaatagagatgggggtcttgatttcttgcccaggctggtcttgaatgcccgactttaagtgatctaccaccttggtctcccaaagtgctgggattataggcgtgagcctctacacctggcctatttaaggtttcttgatgaaaaaattaatgacatgttaaaaataacctagaatatctttttaaaaatatgacataaagggaagatatatttcatttaatattcatattttattaaaatatcaattctttctaaaataacaattataaaattcagaagcttagattaaacatttcctttctgatcattttcttctcttttggcaggccctgaagaggaaagtgaggatgactctcatctcgaaggcagggatcctgatatttggcatgttggttttaagatctcatgggacatagagacacctggtttggcgataccccttcaccaaggagactgctatttcatgcttggtaatctttggaaaatcaaaattatattgaaactctagtgtctaaatttagattataggatttatattttgagtatgtcttatgaaataaacttttggagtattttatattaagagcgaaacttctttataagaacatgtaactaggtttttcttttttgagatattgctgattttttgagatggagcttcactcttgttgcccaggctggagtgcagtggcacaatctctgctcattgccgtttccacctcctggattcaagcaattctccttcctcagcctcccaagtagctgggattacaggcacacaccaacacacccagttaatattttgtatttttagtagagatgggtttcaccacgttggccaagctggtctcaaactcctgacctcaggtgatccacctgcctcggtcccccaaagtgctgagatttacaggaccatgcccggcccaattaaaagttgtttttctttttattctacatagatgcagagttcctcaaatatgctaaacaattttctggattctttatcagagatattaaatcatccaagtcaaattataactttaaaaaatactttcctgtccgtattagtttttagtagtgagagttttttttttttttcttctagttttgaatgttgtttcttctcaggaacagctgacctgacaatggggcctttctctcgacttgtcatttagttctttgggaagcagtttctcagttgtggttaggccaactgaagctgtggagtttgtgaggctttgtttttttcttctttgctgtaagtttttaattttatttttggactttctacttgttttctaatgcgcaatgtgtaaacagtatcattttttactcacaaagcttctcagggtttattctctacttggctcttgttcctgattatttggggtttatctcactcctatctacctggagaaatctactcatatgttgcttttggagccaggaagaaccagggctgaagcccagtatttatgataacagttgattcccagttaattgggtattttagagtctactatgttccaggtactgtgtaaggttccaggggagatattggaggtggatgaatcttggttcttgccttttgggaattcggagtacagaatagctctttaggccattctgccactaagcattttccaaattttagctcattgcctatgaacttcaaggttttggtcacaatcatgtacttctgcctaaataaagtaacttttaatctttcactgaattgaatttattttaaaaggagattttacatcactatcttaaatgggaatccagtatcactaggtataattagaagggctttagaaatataaatatagagaaaccaaaacagtactaagggcctgctacttttgtttgccggagatcctgagtctgagtcctattctgtgtttgttaaaagaggagattagtaacagagaggtgttaactgtatagtggtaccagtctgagactttctccttaatgtctgcaggaggattgggagatcattatgtagggtctctttcaaatagtgtgatttaatggcacttaatgtgatgtccctttacctcttaaattcttctcatggggagattcctgcatttcttgaacactgatctaagtatgcccttcatctcttgccttccatgtgaacattgctttgcagtttacacatcagtttcacacaagcagccccaatctcctgtcagctttgtgagggagatggcagagattgttctttttttaagtgatcttcctaaagtcacttagttatgaggtagaacagggaccagaatgggtggcaggcatcttatgcagtgcttttcctactctaaatggggctatttcaacctgatcccaatatactgaaatctctatgtgggaatgttttcagtgttaaggttctctcttccccactgtctctcctgcctgatctcaggaagtaagtttattttttaaagtccctaccccatcattgagtgtcatttgtaggtaaacattgtttcatttttttttgtaccacgcaaatacagatatttggcctgagtcttaatagatgttagtatcagccagtaaatcactttcctttggatactttgttcagaagtttctattagcaatgtatatctttcaaagaaataagagccagaatgttatcttttaaaatagcttttactttttaaaaatataaaagtggctgggtgctatggctcacacctctaatcccagcactttgggaggccgaggcaggtggatcacctgaggtcaggagttcaagaccagcctggccaacttgatgaaaccccccgtctccactaaaaataaaaaattagctgggtgtggtggcacgtgcctgtaatcccagctactggggaggctgaggcatgagaattgcttgaacccgggaggtggaagttgcagggagctgagattgcaccactgcactccggcttgagcaacagagcaagactcagtctcaaaaaaaaaaaaaaaaaaaaagtaaataagtactctaaaaattcagctatattccatatatttaataacatcttgtgtgttcttttctgattaaaaaagcaatatgtgcttatttgagagaaaagaaactctggaaaaaagagtctgaaatgaagaaagaatataaaaatcaggttaatgcctgatttaatatatttcttttcagtctttttctgtatatgtatgtctggaattatagtagtaatatgaataaaaccagatttactgggaattaatgacaaacattcttttaatcttctcagcaatcctgagaaacaaatattagctatactgcaaaagaggaaattgaggttaaatttatgtagttacttaaccgtggctgcacagctagtaagaagcatggattgtatcttgtcatcttatcccactcggggtctgacatcccatgtcaggccagccctccttctcccgtagggatgccctcctcaccctactcagcgctgaacgctgctcagggttcctgtgccttcttcttcccacctggcatgatgcctccgcctcacctaatggctttaagactaaattgttcaggaagggaagaaaagaagttaatgatattctgtttgtttcttttctgttcttcttaaggttatgggtttctcagggtttaagaactggattataggccaggcgcagtggctcacacctgtaatccctgcactttgggaggctgaggtgggcggatcacctgaggtcaagagtttgagaccagcctggccaacatggtgggaccctgtcactactaaaaatacaaaaattagccgggtgtggtggtggatgcctgtaatcccagctactctggaagctgaggcaggagaactacttgaacccgggaggcagaggttgcaatgagccgagatcacgccattgcactccagtctgggcaagaagagggaaattccatctcaaaaaaaaaaaaagcgctgtattttaatgaaaatattaaataatgacattattcattggattttggtgttataatgagtatacactgtaaaatatacattgggtcccttgagctattgtacatgataaacagaagaagttagcattattttataggagctgatatccaagacataatataaaatctactcttgatttcccatgtcttatttttagatgtaggtgatatagttggtatcctactgaactgtgccaaacacagcacaatatatcccaaagtctgcacttagaatatatatttttattaggatttattatttttattttatttgatttctgaaatgaatcttccttcatctcttttttttaaaaagtcaaaagtaaaagcaaccatggtctaatgctgccttttctctttacttttaaatccaaatagcacaaggagccccgtagagggagggacttcggccccgtgctgatatctgaaatctgaacttcatagcacttatgaaaaggaaacagtttagctcaatttataataatatattggtctgcagaggaagtgcaggctgaaccctgctgtctcaagtaaatactccaggggtgtctgatggggaacgtgtcgggtgcctgtaataaatccactgcccatggaagtgagtgaaggccttgttggcagtgcctgaggacatgcttaactaaggttgtcacggttttacttttaaattggaatctttgccctaatctcagagttagacatgaccagatttgcaaacagatttacaattttcactaattttccaaccaggacttcaaaacacactcagagaaaaaaaaatacactctggtctttctcagagtaggatgatttactttgccacagatgttttccatagactgaatgtaaccagggagttagggacttaaaagtggcttggagacaaaccatgggtttgttttttgtggaacagattatacagttcaagggacatcaacacaattatgtttattaaccaggagctgggtgtggaggtgggatgtttcaggacaaaggtgagtgctaggtaaacatttggggcaaaaaccctctcttcctcccttaatttgttattgttattctttacatgtcaccattcatgactctgttctctctgctctatttacatttgtttcttaagcacaactaaatctcactttcaagtatttgttgttactataccaatcagcagtttcaaaacttaagttgccaggtaaaaattccactgcaaaaaaagaaaactgcaatagaaatgtaaatgcatagcccttcttttttggtttttctttaccttgtcaacagtttagggtagagttgtgaaaggaccataggatttctatcaggtaaccaggtcccagactcaccgcattgtcaattgcctgtgtattgctagtgcctctcttagtctctgccttcactgtaaaatgggagcttaatgatacttccttctcagagtttttgggagtacaaataagaaaatgtatgggaataggctttgcaagctataatttgtaagtgcagacttgtgaagagtgggaactggaccatggcatattggagaaccagtgagacgactgggtgatagaagaatgctgaatgctgtgttcgtatcctgcttcatgcccagagttttgtcaccttcacaaaataccattccatacgtatatttgctacatataggaactacaagaaagggaagttttaccaatggattcttgagggtgaggagaattaatatctggtccattggttatcagagccctgtagtaatcagtcttactttggtggaggccagctttacttttagagcctggccagtagttttttatagattaagttcaccttccttgaaatacctatggcttagaggcagcaagacccagagcacagaaatatttgatgtggtctaaactgtaaattgccatgcttctgttttttgactcaacatggccactcccactggagtctgtagccctgtgagcaggaagaacagaggtctccaggagtttagactcttaagcgggggctcccttgggactgaacatggaaactgtggtatctttgtaaatcctccaggtgtccctcagttttgccctgatttagacattttattcaaaggaaaaagcttttgttatttctttctctgaccccattcccttcctcaccaacctctgaatgaccagctaaagtaaaaagtacacataatttatggcttaatcataaatttaaaataattatactttattacctctcatgggtcttgaaatgtaggtgctatgttctgctttctgccgaggcaagggaataatacagaaaccagtaataaattataacttcaggctgcagttggtaagctggaggaattgctatttaagtggaaagtgcttgaacagccaaatgagcacctgtcatgtttattttcactttgaaaagtagaaacatgacagtatagtttccactgcctatccaatatgaacttctggcattcttgttatcttctcaggaactgcactgtttgcttcttgtgttcaatttttttttttttccagggatgaggatgtatctctcctcctgaaactttcactctaaaatatgcccccaaatactgacattttcaagcttgtgcttttttacttgatatctgattttttttaaatttttatttaatagggagaaggtcatgacttatggaatttactctaaggatagggatctgagcaggttcctgagtacttgaaaggctttatttacctcttacacttttttgttacatccaggtttttgctcatttctctatcatttgtgtcttgaactttacctgaaatgcatgtcttgagtgcctactaaggtccaggcattgtgctggcagatttgatatatttttgtttattccttattacaggactattacatagtagactctcattctgacactcactttttttttccagaaaaaaaaattaatggagattgattgctaatgggtacagggctgcttttaaggctatgaaaatgctctaaaattagtttgtggtgatggttgcacatctctgaacgtactaaaatacattgaattatatactttcttttttcttcgttttgcagcttttgctcaaaggagaattagatatttaaaatgagtgaattgtatggtacatgaattagatctcaataaaactattttaaaaaaagaaactaaagcttagagaagtataatatcttgttcaatatgacactacctggtaaagcttttgtccaaatttttctgagaccaaagctattctttcttccactgacgcatgctatctctactaattatatagccacggtatcctttttctttaaaaatgtaggaaaaaatggctgggtgcggtggctcacgcctgtaatcccagcactttgggaggccaaggcggacggatctcttgaggtcaggagtttgagaccagcctggccaacatggtgataccccacctctactaaaaaaaaaaaaaaaaaaaaaaaattagccaggtgtggtggcgtgcacctgtaatcccagctactcgggaggctgaggcatgataatcacttgaacctgggaggcagaggttgcagcgagtcaagattgcaccactgcactccagcctgggcaacagagtgagactccgtctcaaaaaaaaaaaaaggaaaaaaaataattggagaaataatacatgaacacacatgtattctcattcaaactttgtggaactatatgaaataaaatgtagacattctctttccccttgctttcccatctggtcctttgtaagtgttagcgtaaagatagttatgttgacatatttaaatatatgttgctgctgctgtatttttaaaaaacataaatgatactttattataaatattactctagtgtttgttttttgtacataatatgtgctggaaatttttttatgtcagtatgtcattcatattattattgttattataaaaatactacatgcacaaggaaataaaaattgaaagatttaaaatggaaagttgaggaagatctaaaatggaaagtgaaaaactccacctatccccaagttccatcccttagaggtaactgcttttcactgtatttgcgttttattctttgattacctccctaacccttaaacatatatatacttgtacttttatttctttaataactttaagcattcttggttgttgatcagttaagaatgacagaaacaggcagattgctggagcccggaagtttgagtccagcctgggcaacatggcaaaactctgtctctacaaaaaatacaaaaaaaaaaaaaaaaaaagccaggtaagccaggtatggtggcaaacacccgtggtcacaactacttgggaggttgaagtgggaggatcagctgagctcgggaggttgagcctaaagggaactgtgatcgcgccactgcactccaggctgggtgacagagcaagaccttgtctcaaaaaaaaagaaaagaaaaagaaaaaagaattatggaattagtgctctgatactacctctcactcttgccaaatttggctagttaacctttacttttaggggtttatttccttaattactttccttagaaccagtttatagatactttctcttgaattttagtgtgtaatgtggggaattaaagttctctttcagccatgtcattactttgacatgattgaggtttacaactttacatacagatctgtaattttgataagacaagcacgcttataagttgatctgaaattagaaagccagtacataatgatgttgatgtaagtgttgtttattgcaaaatgagatagagtgatggaattaataggtagaaaatgtaatctactgtaactatccaacctgcgccaatgaatgaagaatactgcacatgtcaggtcaagattttatacttaatcaaaagctcaaaattatgtacattttagcttgctttgtatttgaatcatgactttgttgcatagtttccctctccccctggagacttatattcgtctttttttttactcttactgatagaagaagcatgctataatgattgctcaatatcactagatgtttcgtcatgtgacttgttcagtgtttgataaacactggcttcttcataccccacctaccacagttatcatactgggatttcttctcattggacacctttgccaattccattaaaaaatcattttaggctaggtgcggtggctcacgcctgtaatcccaacactttgggaggctgaggcgggcggatcacctgaggttgggagtttgagaccagcctggccaacatggcgaaaccccatctctactaaaaatacaaaaattagccaggtgtcgtggcaggcacccgtagtcctagtgcctgttttagttactggggaggccgaggccagagaatcccttgaacctgttaggcggtggttgcagtgagccaagatcgcaccattgcactctagcctgggtgacagagcaggactttgtctcaagaaaaaaaaatgtattttaaatttcagtagccttagggatataagcagtttttggttccatggatgatttgtatagtgttgaagtctggtattttaatgtacctgtcacctgagtagtatacatctgataagtgttttgttttttttttcatccatcacccccctcccatcctcctctcttctgaatctccagtgtccattgtaccactctctacaccttcatgtgcccatagcttagtgcccacttacaagtgagaacatgcaatatttgtttgtccattcctgagttacttcacttagaataatggccttcagtttcatccacgttgctgcaaaagacatgatttcattttttttaatgactgagtagtatttcatggtatatatacatgccacattttctttatctactcaacagttgttgggcactttggttgattccatatctttgcaattgtgaaatgtgctgcaataaacatatgcgtgcagatatctttttgatataatgacttctttttcaggtagatacccagcagtggattgttgggtcaaatggtagagttacttttagttctttgagaaatctccatactgttttccatggaggttgtagtaatttacatttccacccccagtgtataagcactcccttttcactacatttctagcaacatctattattttttgactttttaataatggtcattctggctaggataaggtgatatctcattgtggttttaatttgcatttctttgatgatatgtgatattgagcattttttcatatgtttattggccatttgtatattttcttttgagaaatgtctattcatgtcatttgcccactttttagtgggattatttgttttttttcttgctgatttgtttggattccttataggttctttgtcagatgcatagcttgcaaatattttctcccattctgtaggttgtctgtttactctgataattatttattttgttgtgcagaagctttttagtttaagtaggtcccgtttatttattttttgttgcatttgcttttggggtcctattcataaattcttgcctagcccaatgtctagaaagagttttcttctagaatttttatgggctcaggtcttagatttaagtctttaatccatgttgagttaatttttgtatatggtgagacacagggatccagtttcattcttctacatgtggctatccaatgttcccgcactgttttgaatagggtgtcccttttccagtatatcctttgtcgaagatcagttagttgtaagtatttggctttatttatggcttctccattttgttccatcagtctgtgtatctacttttataccagtaccatgctgttttagttactacagctttgtggtataattttaagacagataatgtgatgcctccagatttgttctatttgtttaggattcattggctattcaggctcttttttggttctgtatgaattttaggattatttttttctaattctgtgacaaattacattggtattttgataggaattgcatcaagtctgtaaatttgtttgggcagtatggtcattttcatgatattgattcttccaatccgtgagtatgggatgtatttctattcatttgtgtcatctatgatttctttcatcagtgttttatagttctctttgtagagatcttctactaccttggtcaagtttatttctaggtactttattattattattttttttagctattatcaaagggattgagttcttgatttgattctcagcttggtcattgttagtgcattgcagtgctactgatttgtgtacattgattttgtaacccaaaactttactgaatttgtttttcaaatctaggagtccttggaagtgttgttaggattttctacctacacaatcatattactggcaaacagagatagtttgacttcctcttttcaatttggatgccctttatttctttcctttgcctggttgctctggctgggacttcctgccaattccacttttacttggatcatttgtatttctctttcttagaattttctaaaaattctgttatatttaaattttctaaaaattataccatattttagattcttccaggcaaggactgttttagctttgtatcctgtacagcacctaacacagtactttgaatatggctggtgcttactaagtatttgttgaactaataagtgaatgaatgaaccaagaactggcttttttttttcatttcatggtagtgtgtcttggttatacaagcaaaaggaagtattaattctatccttgaaagcccctgcctgggaaaggttttgaaattccttctcaaacagatggccattcacctaatgcttggagattaccagagacagaatttagaatcttccatggcagcctattctttttcacagtaactcatgcttcttttccttacatctagtctaactaaccacgtgacatcacagaactttctaaagagacacagtatctggatccatctgtacattcccttctaaatttttttataagaaaaccatcaaagataaaaataatgtgttggtttcttttaggctgaggaggaatgttttactatgcattttgaaatttttttgttctctcatatttcattcaattagagtcaccctgttttggggtaattctgcatctgagtttggtggtggaatttttcccattggctaacagtcttcatatgccctctttggccacctgtctattgaacataattcccaaaggcatgagctatagaaaatttttttttttaggcctttatgtaggttgtatatcctgtgtgtgttatttgccactcctgtaaagacagtggaagaatgactgtgaatgatgccattatttttttcagtcgatctttattgaaggttcgaatttaggactaggccgggaatgagtttgactttcctcatctagtcagtcccagcagcacgtttcaaggtcagactatatacctcatgctggaaggttccttagactttgtaatctaagcccaataaacatctttttttttttttggggggggatatttatttaccaaataaataggacagcacacagccatccgtgaaggtgataagagctttgactagttttataaatcttcccctaaatataattttctatgggagtgaaaactcttttataaaaacaattgagagaccgaggcaggtggatcacttgaggtcaggagttcgagaccagcctgggcaacatggtgaaaggctgtctctactaaaaatacaaaaattagctgagtgtggtggcgtgtgcctgtaatcccagctactcgagaggctgaggcaggagaatcacttgaacccaggaggcagaggttgcagtgagctgagatcgcgccactacactccagcctgggtgacagagccagactccatctcaaaaaaaaaaacaagcatggaggtgaagatgatctcaaggtacataagatacatacctaaaggtacaaagatataaatcatagtccttggtcaattcattatagtggttttgtagtctgtcctacagttggttggggtaacaacctcttttcttatttttgttcacactgctctctctaccccctcatctaggtatgtgtatagctcatttatttaggggtgatgttaaaaaattgaatgcccttaatggcaagggaaccaaccaatcaatgtggatgccacaactttttcccctgttgactgttgttattggtatggaagtattttttttttctcccagcttttatttcaggttcaagggatacatatgcaggtttgttacatgggtaaattgcatattgtaggggtttagtatacagattatttcatcacccaggtaataagcgtagtacctgatagataatttttcgatccttaccctcctcccaccttccaccctcaagtgggccctagtgtctgttgttcctttctttgtgtccatgtttactcagtgtttagctcccacttataagagagaacgtgcagtatttggttttcttttcctgcgtgaattcacttaggataagggcttctagctgcttatgtcacctacttatgtcacctactactactaagctttttgagaacctggtctctctctctctctctctctctctctttctatatatatataggaagtcctggattctggggcttcgagggctgacctggagcctgagtccacaagggcatacctggtgctagagtaggcttggagccttcgtctttggaggccaccctatcactggggttcactggggtggacctctgcttggtttacagagaagttgggtactcacttcattctccttcccccacacaaagggtatccctcttgacactgtgctgctcaggcttcagggagaggtgacgtaggtaatttgaaactgttcttcctactcatcaatgtgtcttttcttatttctgtgctccatccaggcaatgtaatctttaacctggattcctttgctcttataaaggtattctgtgcatggatagttattcaaattgatgtttctacaaggagacaagtgctattctgacatcttgcttgaaagtaagggattaatttttaaaccagtttttaacaattattttcaagaactgtttagtgataagaaaacaatgctcaaaatataaaagtatcagggaaaaaagatgcaaaatgtttgtacaacatgatattaattttatataaacaaaggataaacatattactaagtataaaaaaaaactagaaggaattagaccaaataattataaataatattttctcttctttacacttttctatagtttgcaaattctctacaatgagcatgtaccctaattcatcagttccaaggtagacattttttcttcatatttaacatctctgaaattggaatccatcttaaactgatgccttctttgactggatgatatattattacttttaaattaagcaatacaaactttaaaaataagtatccttatgttttaaagcttcaaacggaaatgttcaataaagagattctcaggaaagaggtattcattcaccaaataaataggacagtaaacagtgatcagtgaaattggtaagagctttggctagttttgtaaatcttccccaaaataaaatttttccatggaagtgaaaagtctttcaacaaaacaagtatagagataaagataatctcaaggtacataacttcccctctccttctcccctttttttagaattaacttttatggaatgctcagtttgttgatgggttttgaagagaatagattcttgaggttaataattgatttttgctttgctttcttttctttttttttcctttttgtgagacggggtcttgatctgtcacccaggctggagggcagtggtgggatctcggctcactgcaacctccgcctcctgggttcaaatgattctcctgcctcaatctcctgagcggctgggactataggctcgtgccaccacgcccagctgatttttgtatttttactagagacggggtttcaccatgttggccaggatagtctcgatctcttgacctcatgatccgcccacctcggcctcccaaagtgctgggattacaggcatgagccaccttgcctggccgatttttgctttctaaataagcaaaaagatctttaatccactttagccagggctacctttctcctttattcttccaagttgtaactcttcccaggagactgcagagtatagcgagttggggaaaaggaaagatgagaagggagagaggttagattgacagaaaagataattaaatggttttctccattttcccctttgtatgtgcagagcccatcacttctgcccacagttccactaaactgtgaagaccagaatctctcaaagttaatgaatgaaacagaagaagccacttcaacctccaatttctgtttctatgtcttctgacctccttctttacacatcctatctcatatccaattttccattagcaattaagaaggatagctatggtttctggctaatacctggggagagaaaaaggatgttctctccaaatatgtggtaagtttctagtatgtgcaaggttctacatgctgtgtgtagtataaaaatatatatcactatatatcatatcaatgatatatatatttcattatatgatttatatatcatataaatatatatcactgtatattaaatatattttaatgatatttatatatatatcatatataactcataaaactcaatagcaggttaacaagtaacctgacctaaaaacgagcaaaggacttgaatagacatttctgaaaaggagacatatgaatgctcaacatgtatatgaaaatgtgctcaacatctagtcatcagtgaaatctaaatcaaaaccacaatgagatattacttcacacttgttacaataactattatacaatagacaatagataacaagtgttggtgaggatgtggagagaagggaacccttgtacaccattggtgggagtgtaaattggtatagccattgtggaaaactgcatggaggtttctcaaacagttaaaaatagaactttcatatgacccagcgattctactttggtatacatatccaaaggaaatgaaatcagtatctcaaagagatatcttcattcccatgttcattgctgcattattcacaaaagccatgatttagaaacaacctaaatatctgttaacagatgattgaataaagaaaatgcagtaggtatatctatatctatatctacacacacatacccacacatatccacacataatgaaatattactcagtcttaaaaaagaaggaaatcgtgtcatgtgtgacagtgtggaatatgttatgctaagtgaaataagcaaggcacagaaagacaaataccacatgatcttacttatatgtggaatctaacaatgttatactcataaatgcacagagttgaatgtggtttccaagggtttgagggatgttgggtagatgttggtcaaaaggtaccaagttttgtttatgcagaatgaataagctctagagacctaatgtacagcatagtaactgtattagtctgtcacattgctgtgaagaaatacctgagactgggtaatttataaagaagtttcattggttcacagttccccaggctgttcaggaagtaggacgctggcatctgcttggcttctagggaggcctcataaaattatgttggaaagcaaaaagggggagccagcccttcacatgcccggagcaggaggaagagagagtgaggggggatgtgccacacacttttaaaccacctgatcttgtgagaactcactgtcatgagaacagcactgagaggatggtgctaaaccattcatgagaaaccgccatgatccaatcacctcccaccagaactcatctccaacactggggattacagtatgacatcagattttgtggggacacagatccaaacaatatcagtaattatatttattaatactgtattacatatgtgaaattagctaagagagtagatcttaaatgtttttaacacacacacacacacacacacacacacacacacacgtttactgtgaggtcatgggtatattaattagattggttttagaagtcatttcacaatgtatatgtatattaaaacgttacattttacattgtagatatataaaatgtttgtcaattatacttcagtaaagttcagaaaatgttttaaatcacaaaataatcttctactttggttattcaagttttttgatattatatatattgctacagtgaacatctttgtacatatatctttatttccataggaaaaattgctagaagttgaatgccttggtgaggtattatggtgtggacatttacacagtacatactctgttgtcagactgttacttagagagattttcattttcattcctacctgcaatgtatgaaatgtgatcatcagttacttccaccaacctcctttaccctactgtatacagtgctaagtgttccaatttacaaatatttttgccgatttgatgggtgaaaatatgctattattttaaatgtcatttatttattcatgaggttgaacactttgtatttttgttggccattcttctttctgttattcattggctgatcgtattttgctcatttttctgttgaggtgttagtgtttttcttaacatttactttatcccttctgcctttaactttattgctttaacccttctgcccacttcccagatattttcttatacccaattttcaattttgtatttagatttttaatatttattttaggtgaaacatctttccatttaagtcttaatcgcaatagttgcattaaattaaataacaatatttgaaattatttaactgcgtttatgcttactgctagcctttttgtactgtgatttaaaaaaaattcttgattgttctcttggtcagccaaaatgtagtttctaataatatttatgaagactaatggcaggggagtggtcgtggcatattctttgagtctttgcattatagaagagtgacttcctatcctttcacttgtgaatatctgcttgattggctataggattcttaagtatcaaacttcccccttaaaactctgtagaggctgggtgcagtggctcatccgtgtaatcccagcactttgggaggtcgaggtgggcagatcaggaggtcaggatttcaagaccagcctggccaacacagcaaaacatcatctactgaaaatacaacaattagccaggtgtgatggcacatgcctgtaatcccagctactcaggaggctgaggcaggagaatcacttgaacccagcaggcagaggttgcagtgagctgagattgtgccactgcactccagcctgggcgattagtgagacttcatctcaaaaaacaaacaaacaaacaaaaaaaccaccaccaacaactctatggatatcgttctgtgacctctgatatttgatgttgggagatgtctgaggtgatctacattatggtttcattttggtaagctgtattttctgtttggacatttgtagtattttatatttaattttttaacagaatatgtttatgtccttgctcaaccattttatagtgcagactctggtcttttcacaaccttggaaaacattcttctagtgtttctttgattattcttatatctttctgtatcttacttttttttttttttttcaagatggagtctctctgtcgcccaggctggagtacattggtgtgatctcggctcactgcaacctctgcctcccaggttcaagcaattctcctgcctctgcctcccgagtagttgggattacaggcgcctgccaccacacccagctaattttttttttgtatttttagtagagacagtgtttcaccatgttggcagggctgatcttgaactcctgactggccttaagtaatccatctgccttggactcccaaagtgctgggattaccggtgtgagccaccatgcccagcctgtattttacttccattctgtgattcctgttaagtacatttggatctccaggatctgttcctcatgtctaaggttttccatcactcatttcttgtattttccctgagttataggagaatctcttgagttcactcatccagctcagtaatttggtttttctgcagcatgttttctgctgttcactccatctattgccgtgttaaatgaagaaatgctattaaaaaagtcagttgccagtggttttttctgatctcatactgtttcagcttcatgtctgcttaccgtattttcacagatgcagtgccttcttgaatcaagtgtcttcttgaaaaactgagaattttctaaaattttatcatgtcagttcgagtaaacttttttcagaaaagacagttttgatcaaagtgcctccattcctttgaactgtagtaattttgcatagttctggcaattactccttgcctctttatcctcatagaaagtagactagtactggctgataggcaagtagctgagattggttctgtgagagattagtatggattcctggccaaatcctttacttgaaggtggaagaagatgtgtccttacacagtcatgtagagattttataaattggagtgtgcttaagaacttgtttttgtctttatgtggatgcttgcagtatgagcaaaccatggtaggttttggcccactcctatcattgctgattgctccagttccttgtttctgcaatgcctggtactcagagtcatggcttataacagcagcacatccaggggtctgtgagtatcacaggttatgtgcacagaattctggctacagtgagtatcacaggttgtgtgcatagaatgctcgctacagaggcaagagccttgctctctgagtgccctgtaagcttctcttgccctcctgctctttgctttctgagttaagaggtgagcattttgctcaggatttgattggtatatttatcaggctcgctgctcttttggagagacaatcacctgtcagccttctttgcccttctttaatctaattccacctatactatattcagcgcaatcatttgcacttctggcatattgagcacctttctctaatatatagtgccaaaagaggttttgatccatttttatgttccattgattgtctcattgagaatctaggaatgggacggggcctgtgtctatactggcatcttgccaggaaccttcccctccccctttcattggctatcaaattctgaaaatgttttcagccatgggtggcccacatctaggaaaaacaaggtcataaatattaagattgagagatgagaatggacaggtaagtaagaatgaaaagcttcagtgattgtttgaagctgggaagactggatttcagtactgggcttatttaccccaagagtgcctttagcaaaagtcatgattgtttctctaagaaatttgggtgaaatggccctggtaatgtacgtgacagcaaacccaaggaagtaagggctggggtaaatttagggtgaccaactgtccttttcgaaaagtctgtgggcaaggggatctcaggatgcaggactttcagtattaaaaccaggaaagtcgtgaacatgaattggttaccctagcataaattatagcattgcttctgtggtcttttatatatgaaatgagatttcatgctacagtgaatgtccagagctctcttctccactgccagggcacgcagcattcagccagcaaagagtgagagcgtcttttctttttgtgtgtgtgttgtcacatcatctacaaactcttactccagttggatacagtgtcagtcaagtttcagctgtattctgagatagctgtggtaaatagacattctttaatttattttttctaaaaattattaggaataatcttttaaagctgggagggtcttaagtatatcctttgagatgcacaatccatgaagcttgtgtcgcttttatagatggagttttcgataaattagaagctcttaaatgaaaattacaagtttctttttttaaagtcataaaggattagatacagttggaagcaatttcaaaagaattgtttgattagagagttgccaaggatttaaatgaaggtggaagcctcaaagtataccttctagtgttgtgtttgccatttggcctgagtcactaggtgactcagtgttcccctcagtggaacaaaagcacttaacaaacctactcattaaggtggtgatttttcccctaattatgactgtgggtcccagtattaatagcataggagtaataaggcttttatttgggtagatgagactggcatttatgtatttcctagacattgtcccagtcttttatgggaatttatcctgggaagcccccttcaaactccactttttattattttgcttgactctgaaacctcctttaggcaacatagtcaggatcaaccaaaactgctcaggaatgtcctcagagatggcaaacgggaagagagaatggccacttagccttcctcattaggccttacagccacacttctgctttttatcctctatattgttgtgtttatatttggatttaaaactccaaatgtatcactgatgttttcatcctcacctctaattgcattttgtagttattattttgcaatgtcctaaggttttgtgacttattcaccttcagtcagttgttgctgtgaaaaccccaagagttgttcttgagtttattttttcctgacttgactcatccagttcattagcatgtcctattgtcttttcctagaacattctgaatctgttgtctgcttatcgtctcctcccctgtctctgtagttcaagtcactgttaactcctgcatgacttactgcaacagcttcctgactggccttctgctgccattcttgtttcccctttagttcttcctctttcctatgaaactgccagtcagattagattattgattcttttgaatttgctacacagacaataatataatctgtgaacaaacatactctaattgtttccttctctatttgtataccttttgttttcttttcctgtcttactgtgtcagccaggtcttccaatatgatactgaaaaggaatgttgagaggagacatccttgtctttttcttactctgagcagaaaagtttctagtttcataccgctaagtatgatatttgctgcaggtttccttacacattctttatatgttgaggaagttcttctctatttctagtttactgagaattttttatcatgaatgggtatcacattttgtcaaatgtttttctgtacctattggtatgatcatattttttttctttgtagcttgttggtgtgatagattatattagttgatttttgtatgttgaatcagttttttatacctgtgataaatctcacttggtcgtggtgtaattctttttatacattgttacattcaatttgctaatattttgatgtggatttttgcatctatgcttatgagagaatactggtctttagttttcctttttgtaaggtctgtctgggcaatgctggccgcaaagaatgagtttggaagtattccctgtgttaccttctagtaaagaatgttaagaattagtataatttcttccttaaatgtttggtagaactcaacagtgaacatatttgggcctggcgctttggaaacatgttaattattgattcaatttctttaatagagataggcctattcatattattcatttcttcttgtaagagttttggcagattttatttctcaaggaattggttcattttttataggttttcagatttttgggtaaataactattgacatcattttaaaattatccttttaatgtccatgggatctgtagtgatgtcatctctttcatttctgacattagtaatatgtttcttgtctcttttttcttagtctgcctagaggtttatcaattttattgatcttttaaaagaaccaacttttgctttcattaagtttctttattagttttctgttttttatctcatcgaggtgcattaacttttattgtttcttttcttctgctttggattaatttgttctttttctttaatttcacaaagtagaagcttagcttattgattttagatctttcttcttctaatataagcagaatgctatattaatgctatacatttgtggcatttaatgctataaattctcctctaagcagtgctaatgttgcttccaacaaattttggtaagttgtgttttcactttcatttagttccttttttttaagatttttttgacccacagattattagaagtatattgttctatctccaagtatttgggaattttccaactatctttctgttattattttctagtttaattccattctggactgaggtcaaatattttttaaaaaaatgtttcagacaaataaaaattcagggaatttgttgctagtagacgtgtattgcaggaaatttgtcagaagaagaatgatatagatcagaaactcagatctacataaagaaaggaagagattttgagatggaataagtgaaggtaaaataaaaaccattatttttcttacccttaattgatagaagagataacaatttattcacaataataacaacaatgtattcaattatgtacgccacatatgtgtgtgtgtgtgtgtgtgtgtgtgtgtgtgtgtttgtgtgtacctatgtatgcttatttgtaagtgaaagtaatgataacattctcttaaatttggtaatacgtgttttatcgcccagaatgtggtctgttttggggaatgctccatgtgagcttgatactagtgtgtattctgctgttgttgaatgaaatagtctatgtatgtcagttatattcaattgactgatggtattgctcagttcaactatgtccttaatgattttctgcctgctgtatctgtcgttttctgatagagggatgttgacatctccagttatagtagtggatttgtctgtttttccttgcagttctatcagtttttgccttatacattttgatgctctactattaggtgcatactgttatatcttctgggagaatttaccactttatcattatgtactacccctttttctctgtgataatttatctttgctctgaaatctgctctgtctgaaattaatataggcactccagctttctttagattaatgttagcatagtatatctgtcttctttgtttctttaagtttaatctgtgtgtttctttgtatttgaattgagtttcttgtagatagcatatgccttgttttttatctattctgataatctcttattttttaatgtgtgtatttagaccatgggcatttaaagtgattattgatacacttggattaatatctaccatatttgttaatgttttctatattttgtcttgttttttcccctgtttttgtcttccactctttttctgcttttatagttttgagtatttcatgatttcatttcatctcctttcttagcatatcaattacatatgtatttttttactttttaagtagtgacctagaggttgcagtatacatttacagctgttccaagtccactttcaaataacactatactgttacacagatagtgcaagtacagtaaaataaaatattcctaatttttttctctcatctcttatactcattgctatcattaatttcacttacaaataagcatagataggcacacatacatatatatatatgtggcatacataattgaatacattgttgttattattgtgaataaattgttatctcttctatcaattaagggtaagaaaaataatggtttttattttaccttcacttattccttctcaaagtctcttcctttctttatgcagatctgagtttctgatctatatcatttttcttctgacaaatttcttgcaatacaagtctactagcaacaaattccctgaatttttatttgtctgaaacatttttttaaaaaatcctttctttctttctttttgtttttttgagacagagtttcactctgtctcccaggctggagtgcagtggcgtgatcttggctcactgcaacctccgcctcccgggttcaagcgattttcctgcttcagcttcccaagtagctgggattacaggtgtgtgccactgcgcccacctgatttttgtatttttagtatagacagggttttaccatgttggtcaggctggtcttgaactactgacctcaagcgattcacctgccttggtctcccaaagtgcttggattacagacatgagccaccacacctggtctgtttctcctttacttttaaagggtagttttgtaggatccacaattctaggttgctgtttttttttcctctcaacaccttaagtatttcacttcacttttgtattgcttgcctcgtttctgaggaaacgtcagatagctttttttttgctccgttatagataagctgttttttccttctggctttttcaatattctttatctttgactttctgcagtttgaatataatatgcctaagtgtaggtttttttcctgagcttcccgagtctctagtttggtgtctaacattaatttaagaatattcttagttattattgcttctaattttcttctgttcctttccctctttcttcgccttctgttattccattatacatatattacacctattgcagttgtcccatagttctgtttttttttttttttcagtcttttttctctttgcttttcagttttggaagtttctcttaatatatcctcatgctcagagatctttcatctgccttgcccagttctctaatgagcccattaaaggcattcttcatttgtgttacagtgttattgatttccagcattttgtttttgattctttcttagaatttccatccctctgcttacgttccccatcagttcttgcatgtcgtctacgttgtcctttagggtccttagaatagtaatcatagtttcaaaaacatttctgataattaatttctgccatttctgactctgggtctgatttttgctcagttttttcaaattgtgtttttttgccatttagaaggccttgtacttttttcttgataggcagatgggatgcactggataagaggaactgcagtaataatgtggtggtaaggtatgttgggaggggaagcattctataatcttatggttaagcctcagtcttttagtgagtttatgcctgtgaattgtgaacctcacaagtgcttctcattttcttttttctcattcttagttccaataggatggctagcaggggctaggagttctaggtggcattgaagtatgttcatgccactacactccagcctggatgacaagtgagaccctgtctcctgagaaaataaataaataaataaataaataaagtcgctattttttcccttccttctgccagaagcatgagaagatgtttttggatcttcactgtgagaacctgttagagcttttggagataaaactcacaaaagtgtgggagttccctaagatggagctcccctggactttttaactctcagtcccgtctacgttgaatctccagcaattcagtagttacagttacggtttttctatcctggaactggttcccatgtgtgtttctgcttcttgttttttactctgataaattgtcatctctgtttccagtgtgtctctctctccagagtgaggaatgacaaaattacatctcattgaaagccactgctcttggttttataatatctttacatctttgatttaccacaatgtaactttgaatgttgtaccacttttccttccatcctcttttgtgctttttcatgtgttttacgtctgcatatgttataaacctcagaatacattgttattattttggatttaaaaaggcatttattctttcatgatatttgttacttatgttactttttattcctttgagcagatctaaattccttctgacattatttttcttttgcctgtagaatttcataactattcttatagtgtaaatctactgaatataaattgtttcattttctttctgaaaagtctttatttcacttttattttggaaagggtgttcactatgtatagaatagtagattgacagttttttcctttagtattttgtcaccagttgtcttctgagttttataacttctgatgagaagtctgctgtcattctaatctttgtccctctgtatttaatgtctctttttctgactgcctttaacctttccactttattactgattttaagacatttcattatgacatgctttagtttagtcttatatctttttttgcttagaattcgttgagcttattggatctctgggtttatagttttcatgaaatttggtgaattttggccattgtttctataaaaatgtgtgtgtttttgtcactctttcttccctagaattcaaattaaattttcattaaatggcttaatattgtcctggctgtcactcatgccctttcatatttttgtagtcttttttgtttagccactttattttgcatagtttttatttttcatgtgttctagttcactgatcttttcttctgcagtttgtaaattgctgttcatctcacttagtgtgagttttgtttcagatactgcatgtttaacctttagaagcttcacttatatatatatatgaaagggcagatatgtacatttagaagaaaagagagatgtgactacctcgcatattttgtgtgtgtgtatgtatctttcatttctctgttactttttgaatggatgttgggtattgcacatcgtatttgttgggtgcctgattttgttatatacttttacatacttttggcttttgctctaatgaataattaaattactaagaagttggatcctttttttttttaaattttgagatggagtttcactctcgtttcccaggctgcagtgcaatggcgcaatctcggctcactgcaacctctgcctcctgtgttcaagcaattctcctgcctcagcctcctgagtagctgggattacaagcacctgccaccatgcccagcgaatttttgtatttttagtagagacagggtttcaccatgttggccaggctggtctcgaactcctgacctcaggtaatccacccacttcggcctcccaaagtactgagattccaggcatgagccactgtgcctggccagaagttggatccttttgaggcttagttttaagccttgctaggtgggactagagcagcctttaacctaggactcatttagccctacttctgcagtgatgctttcctaaggattttctagtatctcatgtagtgggagccattttggctgctgggatcatagaatactcctggctgtgtgtgaaatctgaaattggttccacctgctgcattctggtgcttctttttttggcccttgggaaatttttattcatacatgcacaggtcagtgctcttccaaatacttgagggaaccttcctgcagtctgtttgctgtctctctgtatagctgtttctgttccagcattctgcctttcgaggccctgtggccttggcctccctatactccagtctttgtcttctcaacttggcaagaaagaaacagagactctgggttttgacttcctcttctctattctgtggcattgaaactgtttccatggagtaagttagggcaattgtaggcatctctcacctattttgtttctcttctccatgggattatatcttgctgaaacctttgattcatatttttggcttgttttgtagttgtttaagacagaagggtaaatcttgtcactgttacttcacaatattcataagcagaaatcctgtcttaatatcttgcatttcttttctatgtttagagatgatattgtaggttgtttttgctgatacataaggggcctggtggcatttgcctcttggtttaagtcattatcttttttggtatcttgataaaaatcttgtgttgcctgtataggatgccattgctggaaacattacaactctctttttttgtaatagaggaagtcatgtcctgagcagaggttgtatagattttgcctgacttgtggtatcatttcttaggatatataacaacttggtcattggtttttctcccactgcttgtggttttaggaatattcttcaactgatgaattcaccacctacttcattcttgggttgtgaatccctacacttgagttctgttctaagagccaaacatgcaacatgctgagttggttggtttattgcctggaaaattgttagggcaaaattgatactttgattatggagggaaagaggcagatttttcagatgaaaggtgtgcaactccaaattctggtttattctaaagataagggtagaagtagatgtgtcatgagaaagtgaaagaagctcaattcatatatagtgaattttatagtgggtgggcataataggaccacaaataagtagagtgaccctatatctcatttgctgaggacagtcctggtttatacttgttgttctggaataattgttaatagcatcccctttcactcttcaaagtgtcatactttgtatgatagaatatatacatatttagttatatacatatgattatatatatctacttatatatacttgcatatgtataagtatatataagtatatcatatttattgtatacttatatttatattattatacttgttatgtatctacatatatataatgtctacttataagtagatacgcatataatggaatatatatatatgtagtcacctacttataagggattgattaaagaatacaaggtaagtattgattccttggttattgttatttcttggaagatagatttactgtttactttgtgttttagttaaataatatatagtatatactgactaataaatatggttttatacatttctggtgtttttcctgtagatgatctcaatgccacccaccaacactgtgttttggccggttcacaacctcggtttagttccacccaccgagtggcagaggtaagtgtaaataaaaatgtgattcacacctaattggatgtgacagaagtggttgaatgagcaatttactatagagctttggaagagtatttgatgggaaaattgcttccatctaacttgactttcgtctctgtttacttgctttttgagctttggattgtgttggatacagttttagaaagcatattcatgccatgggataagtgtgttttgcttcttggggttatgtttcttggagaaggaaaatgccgttgacaagtgtttatagttagaggtttatttagagggttgtatctgtcaaggtcaagggcaggagatgaccagaagaattggggcagatttttatgcttgtgcatgtgttagctgtggctgggttcagatgttgagaattttcatttcccttaactttttggtcagacttctgggcatgtgaatgtaaagagaaagttacagggttgccaaggagtttctgagctccacagttgtgttcataacccagactttattgctaaattctgccaccacttgcaatggcccatggttagctgttcagactagttcagaatggaaaactaagaaatgagaaaaactcatattagtcatgttggggtcccatgtactcagttaagaggggttccagagagcaaggcatgaaagggattacaagtgaccttctacctaagcttgctatccatgctttgctttatagcttgacctttcatggaactacaggggacaagtgtgagaaaattgggcggaagtggtacaacaaagtgagaggtacaggtgcaaggtcttccagtggcagtactgcgtgagtctatacggcagtgttgtgtcttttggtcattaagtagctttaccagtggaacgatcatattgctgtgtggcagagagagaatgaatgagtatttaaaccaagatgccagcaagcccatccagcacctctttcttcctttctcccctttcttctcttttccattcactcattcatttaaatatttgagtgcctgttatgtgtccaaaactgtaggcctgggagatagagccgtcaacatgcccatgatgcccaccacttttgtgaactttagttgggggggacaaattttaaacaaataaacacagaaataattgtcttagagacctaaagggagttctgttagaaaagagggaagcgagggaggaaggtaggtaaggacgaacagaggaagaaaagaagggagggagggaggaaggaagagagggagggaggaagggaggagcaagtatttatagagcatctaatatgtgccttgtattatacacaaggatttcatttccccagttataggcatctgtctttctagctataaccctcctaagaatccctttcttgtggatcacttgagtatatggctacttaagtgcgcccttctacgtctttcctaatctaatccagaagagtggacagtctcattagtgctgggttcaaagggctgtacaaaatgataaataaaaagcttgggaaatatgttcatggggataagaatcgtacctaatcgtagtgttcttatgaggattaaattagttaatacatgtaagtctttttagaacagtgactggtatacattcaaagaagtttgccactactattattaaattacttctactgctactactgtcttttcattttattctgttgaaaaactaataggagatgggaacaactaaagttcactgtgtggaaggttattctgtcttcatttgtacactacagtgtacataataaagcaagagagattaaatcatcagcaagttttgattgtaggaactactattcagaagggatttcagtttgttctctcttcaaacttttattgaactttatagtgttcaaggtattcttgtagggacttgtgaacaggaatggttatattcagtgtcttcaagatgcttatggtctaaagagtatgtacagtgcagaatagaatgtagcagatagcccggctaaattttgtatttttaatggagatggggctttgccatattggccaggctggtcttgaactcctgacctcagtcgatccacccacctcggcctcccaaagtgctgggattacaggcgtgagccaatgctcccggcctagattttagtttttgataattgtgtcagaatattcttgggattcaatacagaatgtctttttaaagaaatttacattttatgaataattatattttgaataggtagttaatgcaaatggttcaaaattaaaaaaaatacctaaaggtatacagttaaagtctctttctcctcaggccaaccagcccctcattcccagaggcaaccaatgtttaaaggttcttgttactcttttggtgatatttaatatataagtaaaaatgtatgtaatttcaaaaatatttttaaatataaatggtagcctactatatatatggttctgtagttttgtttcagtaaactttggtaataattactcatcaatatatagcacttagcgaggagtaggtaatggctttttagatatgacatcaaaagcataaacaactgaagaaaaaaacagataaattggccttcatcaaagttaaaaacttttgtacttcaaagggtaccataaagaaagtgtagaggacccatggaatgggagaaaatatctgcaaatcatatatctcataaagcacttgtgtctcaaatattccaagaattcttagaactcaataattcaaaagagaaatgatccaatttaaaatggcaaaggaatcgaattaacatgtcacaggctgggtgcagtggctcatgcctgtaatcccagcactttaggaggccgaggtgagtggatcacttgaggccaggagttcaagaccagcctggccaacatggtaaaaccccgtctttactaaaaattcaaaaattagccaggtgtggtgccacatgcctgtaatcccagctattcagcaggctgaggcaggagaatcgcttaaacctgggaggtggaggttgcagtgaggcaagattgcaccactgcactccagcctgagcaatagagcaagactccgtcttcacacacacacaaaaagaaggtatacaaatggccaatagacaaatgaaaaatgctgaacgtcattagtcactagggaaatacaaatcaaaaccacgacgggataacatttcacactcactaggatagctagaataaaaaagacagtgacaagtgttggtgaggacatgcaggaagtggcacccatgtgcactgccagagggaatggacagtggtgcagccactttgggaaacagtctggcacatcttcagaaggttaaatccaaaggtaccctatgacacagcaattccatgcctaggtagtttcccaagagtgatggaaacttctacaggaatgttcataatcaccaaaaagtggaaacaacccaaaggttcatcacttaatgaatggataaataaaacgtggcatatccatacagttgaatattattgggcattgaaatggaatacagtaatgatgcatgctacaacatgaataactcttgaaaacatacgaaatggaagcaaccagtcacaaaagatacatattatataattcatttatatgaagtgtctagaataggtctctctatggacatagaaagtagattagtggttgcctagggttggaaatgttggtagaaatcagttggggttgggggtgactgccaaatggcacagggtttctttttggggtgatgaaaatgctctaaaattaattgtagtgatatttgtataactctgtgactatacgaaacaacattgcattatatgctttaaatgcttgaattttatgacgtgaattatagctcaataaagctgttaccaaaaaaaaaaaacctatctcaaactaggcctgattatagattatttacataaaacaaaacactatacatccagaaaaaaattattccacatcccacccctctctctttttgttttctgcaaccatacgtcattaaactagttttcctattgttaagaaatttaggttgtttctaatcttgcatgaaaatgcaattaataacctatgtagctcactccatacttgggaaagtaaaggtgcaagtagggaaactttctagatagaagtcattttaaaaagatgttgtaggctgggtgcagtggctcatgcctgtaatcccagcactttgggaggctgaggggggtggatcacttgaggtcaggagttcgagaccagcctgtccaatatggtaaaaccagtctctactaaaaatacaaaaattagctgggcgtggtggtgcacatctttaatcccagctacttgggaggctgaggcaggagaattgcttgagcctaggaggcagaggttgcggtgagccaagatcatgccacgccactgtactctggtctgggccagagagtgagaccccgtctcaaaaaaaaaaagtgttgttgtagaggttgctgtgggacaaaaatgagtggtcattcacctttattctttgtggggttttttttggcaggaaattggagctgcctgcccttatgcacccagcactctgggatcttcatattaaaatacattttagtcaagcttctgtttcttggcacagaaactttgtttttcccaggcttgttgatgtcgcattgtataaaatggcagtaaatgtgcaaggaaattttatatcagaggattagccttcaaggttatttacaagggctcagtttaaattataaataataaaaccaaaatattttagggatacattttcctcattgggactgaagggtatttatagctgactttttattattctaggaaatcattttaatatcaaaacaggcagatgcactgcccatgtgcattggcctcttttccaacatatgatcatttataaaaaggagtttgtccatttgacctctgttttgctcccacggactcagagagggatgaactagttatctgtgtccttgctgaggcccaggtactaagttatgcctttgaatgtgccttgagggcttaagccaaatattctccattatttgaagaatctattctgccaaggactgccactgcctagtgtatgctttttgcagaaaagagaaatgagttctttgccttgtgattataactgcatttttccccgctgtcattatagaaccatttattgtgcttttgaaccagctttgcagcctggttacctttctttcctatctttagtctcagggcatttgagataaaaagtcagtgtccttgacttcttggttaaccagttattcatccaataattatttattaaatttcttccagttttcagactcagttctagatgttgtagtatatatagaaaatgtatttaacatatataaatagggcgttagcctccgggacccaaatgtttagttagagatatgaggcccacgtaaaagaaaaccagcaaactaagtggcccaagtgaggccaaactggcagcacagagcccagtggaacaggccactctagtaattcttgagttcgtgagtataggccgggcacagtgactcacacctgtaatcccagcacttttggaggctgaagtgggaggactgcctgaacccaggagtttgagaccagcttggataatatagcaagatcctgtctctctctacaaaataaaaatttagaaaaattagctgggcagagtagtgcctgcctgtggtaccagctattcaggaaggtgaggtgggaggattgcatgagccccagaggttgaggctgcagtgaaacattattacaccactatactccagcttgggtgacacagcaagaccctatctcaaaattaaaaaaaaaaaaaaaaaaaaaaggagtatagactgagccatggggcaacaggtgaattcacagccagggacaaatatgaacaatcctaggaaggatggtagagtaaacttagattttgcccataattgtgattgctggttctgtctcaacagtgctcaacaggaaccttggattatattttacaacgctgtcagttggctctgcagaatgtctgtgacgatgtggacaatgatgatgtctctttgaaatcctttgagcctgcagttttgaaacaaggagaagaaattcataatgaggtaaggactttctttttttttttttgagatggagtctcgctctgtcacccaggctggagtgcagcggcatgacctcggctcactacaacctccatctcccaggttcaagtgatcctcctgtctcaagctcccgaataggtgggactacaggtgcatgcgccaccactcctggctgattttgatatttttagtagagacgaggtttcaccacgttggccaggctggtctcgaactcctgacctcaagtgatctgcccgcctcagcctcctgaagtgctgggattacagtcatgagccactgtgcctggcaagactttcaagaattgtgaaagatctgagattctaccctacttgcaagctaacaagttaatctgccacaatttcatattgttataagacgtgagactcttaggtcacagatggaggacaggttattacgtatatcaatagcagtcaccagagtctccgtatttttgtgttagttcacgaacttattctgttcaggctgcagtaacaaaattgcataaaccaagttgcttctaaacaacagaaatttatcctcactgttctggaaggtagcaagttcaagatcagatggcatcaagttcaagatttgatgtctgctgaagacttgtttcgtgattcatagatggcaccctctcactttccttagacggtgcaagggccaggcaagctccctgtggtctcttttataaggctactaaagtcttttatgaaagcagagcttcgtgatctctcacctctgaaaagccccacctcttaatgccattgcctcggatgttaggatttcaacataagaattttggagggacatggccgggtgtggtggctcacgcctataatcccagcactttgggaggctgaggcaggcggatcacgatcaaaagatcgagaccatcctggctaacacagtgaaaccccgtctctactaaaaaaaaaaaaaaaaaaaaaaaaaatacaaaaaattagctgggcatggtggcgggtgcctgtagtaccagttactcgggaggctgaagcaggagaatggcatgaacctgcgaggcggagcttgcagtgagccaagatcgcgtgactgcactccagcctgggcaacagagtgagactccgtctcaaaataaataaataaataaataaataaataaaaataaaataaaaaagaattttggagggacatacacatacagaccatagcattctcccagcttctgtttctatagggcaatgcaaaggaggctagataacatgtacatattgaggagttacattataggagaggaaccatgagctatgggaacctagtctttttcaaaggatagtaagcatgcctgtcttttgctgtaggtcaagacactgtcttcatcttccaagcctatatgcacacctgccctttgttctagagggagaaactctctctgtcaaggttgttgctatgtaaacatccttgcaatgagagtctgtaacacaggacagtcattgcttactcacaagacacgcagaagcacaagagactcatgaagaatagtctcccagcaaagactgctgggaattgagggtaggccctgggagcaagtgtcactgccttgcttttcactgatgaaatcagttgcaattctgcagtctgtgagaccagcaggtctggatcccatgggtcaaagtttcgcaaactctacttttcccactaataccctctcaatatttgctttatctttggactacatacattgtttagttacttaatattttactttaaatcaactcttttttaacatgtatacatttctttaaaaagggagctttatattgctactttaagtggaaatccagtatcattagccaaaagaaaaagtatccagaaaaatagatccaatgaaaacagagtaatgttattacattccagcagatattcttgtctggaggaggctctgagcctcaagtttcctttcttcatgttaagaagggagattagtggtaatggttgcacagctttatacattttctaataattattggattctgcacttacaatgtgtgaattttatggctgataaattatacctcaaaaaaaaccattaaaagaaaaaaaggagacactaaaatgtggttgagaactgaagttcattcaccaatctgagactttctttttgatataataagaaggattgatggggaatttggagttaaaaaatgttctcatgcatcctttctataattaattactgagcacgtgccagacactcttctgggcgctttagaatatattggtaaataaaatagacattctagtacagggagatgatggtaagtaatacacttaacacactggtaaattatacagtatgttagaagttgataagtgctacaggaaaaaaaaaaaaaaacagagcaagatgatagaaattgagagaactagagagcctccctgttgaaaagatgtcctttgagcagagaattgaaggacatgagaaacagccatgtggatatctggggaattgcattttgggcataaggagcagccactgcaaaggctgtgtggtgggggaatgcctggagtccgtggaacagtccaggaacagtatgtttgagtgaagggagtaaggctgctacttgtaggagaagaggtcatagaggtagttccatgagactggggagcagcagattgtataggtccttggaggcccttgtaaggacaaggcctttcctttttactctgcaggaaatggggacccattgaagagttttgagcaaaaggagaaataatgtcgtctcccatggcaacatataatatcttttcaatgcctttataagttatttaatatcttgtgagctgctccacactttgtgaaacattgtcataatctccagaaccacaggggaagcaattctgcctttcaggggagtagtaaccacttttgatgctgagctcaagtctgacttgctgcccttcattgtgcctgatgggtgttctactttctctcttattagtccctgctggagacattgctgatagccagaacttcaggaaagaatacatttatgggcctgatgacctccctgaattagagcaaagttatgtctttctccatatttatagtatagaaattctaatctcaaaatgtagttatttccttcgcaaaaaatctcacaattttcagtgtcagactagcagaatgggtgctttctttaacatgcatatgggctgttgtatttccctatcctttctcatctcttgtgactgactgtgatgttttttaccatcaatggatgggagaaatctgtaaaatcacactgtgtatataacagaatatcgtcatctaagtctgtctgcttcaggctgggtgcggtggctcacgcgtgtaatcccagcactttgggaggccgaggcggtggatcacctgaggtcaggagttcgagaccagcctggccaacatggtgaaaccccgtttctactaaaaatacaaaaagttagccaggtgtggtggcgggcgcctgtaatcccagctacttgggaggctgaggcaggagaatcgcttgaacccgggaggcagaagttgcagtgagccgagattgtgccattgcactccagcctgggcaacaagggcgaaactctatctcaaaaaaaaaaaaacaaaaaaaaaaaaacaaatttgtctgcttcagaaagtgactggctgcttttgatattatgtgttagggaggtggggcagagatgtactgtatcagaaacctcggccccctggggttgaatagagagattgatcttgaatttaaatagcgtgtgtgccagtcttcaccatccccccaatctctgattcttcaaggtcatctccttactttcacaattaattccatatgtcagggcacattgtcagatattgttcttttgccatacaagttggcctgggatttagcagttgcatgctcgctctctactttgtcctgttgttcaatgaaagcccacgtgtctgtaagagttctcccagtttctttcttgcttgcctctttctgcaaggccatgtgtcttttctggacaaatcacaggatgaagcccttggttttacatactgcaagctctcagtctgtgtgggttgaaaagtggtttgttttccttgtctaggatggtttctaactaagcagtttcggaagtttgggcatatgttttggagtaccttatgggagatagtttttccaatttaagatgcttaggaaaggttcttgtttaattataagcagaatcttcttccatgttattaaatggcccactttcctttttaaagatagtaaaatgtggaattcagcctcttctcttagtaaatgtcccctagaagaatggaatgtttgatggtattgtttggctctcattttcttctgatcagacctgtggcttccttataactactgcaaaagggccttcatagggtatctctttgtaggcagagccttaccatgtcttcctggtctaatttctttctcagtgaagtaacttctttccgttattacagtgagacattaatcccaaggggcgcagtcacacatctcataagggagctctatggctgacttgggaccaaatcaagagcctaaataaacttggtagaagaaaagtaggtgacgtttgctgacccgttggaatgatggatatgatttacaactatatggtgataaagtggctcagaaatattcttttgaagtcttattagctttgctctccaatgcctaagtgcccaatgactgaagtccagatatgtgggttgattccatttctttctcctcttctaggcttatttccattaagtgcatgttcaaaatcagggagtttggtttgtaagtatcatgaaaactttgagagaaccctgagagctcctgcaggttgtttccctgctattgaggtcttcagggatgtgtcacccgtggaatgttccttggccccaagtcagcatttgtcctcctgacggcttgcctcttatttctgctgtgttagctatgagcatcctttggcggcctacaactctggagaagggaggaagacccaactcctgtcatggttaccacttcatcagtcagtcaatatggttagacattgatgtttgtttggttttttagccccaaagtaataaggactcactgtattttgcgttctgactctttggttttgtgcagtgtccatgctgtagctttccttcctaatttccagagtttattacctcagactctgaatcaagcaggtggagattttttttgccttcttaattaagtttaaggagagagtcagctacttctttctcttggcagtggggaaactggtaaacgtggcatttgattaaaatcctgtaatagtttttacccacaacattgaaatgaaaaagtcaggtcatggagttgaatagaaggcatgccagtggacttgatgtccagagattgtatctcatgggcagtacttcaactcatgaataaaattgtgttgggagaaggtcttcagtgctgttgaacgtttctgactggcattagtgggaaagggtgggcatgaattgacaaggacattaaaacttttcctggtcagaaaattggtaagattgtgagatgcttgaggacaggaagtccaaagccttgtggtcttgtttagtatgcattcttgacatctagcaagtgcctaacagatagtaggcagtaattgtttctgtcttacagatgacatagctattctgtagtggtacccacttttgaactgactccagaacccatattccttttttcttttagagacatggcctcactgtgttgcccagactggagtttagtggcgcgatcatggctcactgcagcctggacctcctggctcaagtgatcctcctgcctcagccatctaagtagctgggagcacaggcgcgtgccaccacaaccatctaactttgtttatttgtttattttgtagagatgaggtctcactatgttgcccaggctagtttcaaactcctgggctcaagtgattctcctgccatggcctcttaaagtgctgggattataggtcagagcccttatttttaaccatgatactatctgcctcaaaacatggttgggcatccaagggaagatgaaggcattatttattaaaatagccagggctctctctttgctctcttgtccaatagcagagcccctagatatagccttctccttgcttccaagttttaatttactgaaatccagtttctagtgtaccctgatagactggataaactaattacatatgataatctatttccagagtcaccatggttggcgagccttatccattctgtcctcttcaacaggcataaccagcccaaagactggaaaatcttttaaaccttttcaactctttctaacatagggcttgatgttttgctaacaggctctttccatagtgtgaacaaattttatgtgaaatccatcaaaaagaactcatttttttcttgaagtaagtatgttgttaaaccagtatcttcacagaagttgaaccacacttgtattaattcttctttcaaagtactcaaggttacatctgttaaccactgtcttttaatagcacagataagttttagcaactgttgttttaatattgtctacattccttttttgttttgttttgttttgtttaaacaactttaactgaaatcagtcctacatagcaaacaaacatttagttaatgtaaactaaaaccttttcatacaacttggtattctcaggttacttatttgagccatttccaccatcgttaaatcttcacaagttgcttttgtttgcctcatgaaagttcaatatggataaacacacaaaaaaattctttgcggtaacaggtgaagattataatagctccatgtctatatatggaacatgatcaccttagcaaagccagacaatccagcctgaagctgtggtggctccacgtttctttagcgggcagtggtaaaaagagtatttaagatcggtagcattgtaccttgattttcaagttgatgaatgatagaagacttagaaaatggatagaaaacaattttatatatttccataggttaactcagcctctcatctaaatatgttgggattattttagttgcaaggggcaaaacgttcaacctgaactagcttaagtaagaacagcttcaggaatagttcgatcaagggtcagttgatgtcatcaggatgtggtttttgtcttttcatcttgcagctacccctactatgttggctccattcttcccattgctggcaaaatagctgcagagtcttcttcctgtagtttctgatagtcttgagactcattctgatgggacatattcctattcctctcaatcctagttctgtgactagagaatctagtgggctgattggcttagacctgggttgcatattccacccctggcattggagctggagcctcctcagaccacatgggctgtttgggggaagggatgggtgggatttgtctggaataggaggactgccaaggtggcaaacagttgaagtttaccatagtagattcatcggaaggaaagtcaagttacttgagtatttctgatctgaaaatctgaaatctgaggtgctccaatattcaaggctttttgagcataaacatgatgctcaaaggaaatgtttattggagcatttcagattttggatttgaaatgcttggccaataagtatataacacaaatattctaaaatcagaaatacttttggtctcaagcatttcagataagagatattcagcttgtactaatatgattgctactcttgtttttaacctattgtcacctgccctgagttgacaagtgacaatttgaatggctttgtcggtttaatgtatgcctccataattagttttatatatataggttaagattatcaccagctcctcctggcccatgggtaagttattttaatttattgtaatttaagaaacttataattaatatttcctaatatatattggtgttttgcttgtaataccagccttaaataaagacatttaataaaaacgtattcagtttatgcctttcccatcaaacatagtacagcctgctttataattaggatctcagtatttgttgttgattgacttatagtttcctcacatctgactaataaatgtgtttgaaaacccctctctggcgtgagctgggttgtgtaagagaatttcagctttttaattgttttattttattttattttgacacagagactcttgctctgttgcccaggctggaatgcagtggcacaattatagctcactgcagcctcaaactcctaggctcagggaatcctcttgcctcagcctcccaagcagccaggacgaccagcacacaccactgccaatttatttttaaaaataaaaataaattggccaatttattattaaaaataaaaataaattggccaatttattagtagcttggccaatttatttttaattgttttattagtagcttggccaatttatttttaattgttttgtagagacagcatcttgcaatgttgcccaggctgggcttaaactcctggcctcaagagatcctcacgtctcagcctgccaatctattaggattataggcatgaaccaacacgtctggccagacctcagttttaagactactcttttcttagctttgcagatatgctctggagatgccagcttacactgggaactggttaggctgacctttctcaccttttctcatcctatggccatcaagttactggaggagaattaagagacgaagtcattgtcctcgcttgtctatcacaagggtattaaaaccaccatcttctctttatggtccacaggtcgagtttgagtggctgaggcagttttggtttcaaggcaatcgatacagaaagtgcactgactggtggtgtcaacccatggctcaactggaagcactgtggaagaagatggagggtgtggtaagtccatcagacctgggaccgtgttttctgggctgctgtgttatacaaatcctccactgcctcatttgcttaggcaaatgtagatttaattattcctaattatcaagttagattcttcttggtaaggtgatgggtatagccaggattttgtcagtacaacctcagtttagttcaataagcatttattgagtattttctcctcatagggcatgtgctggacatatactatgaagtggtgataagaggataacaattcgaaaataatatttaacattcatttgcatttttatatgcatcaggtgctactctgttttctcagtattaactttaaaaaatttttacagcaatgctaagaggtatagaaacttttccaggccttaatttgtggatgtgaaaactgaggggcagggaaatgaagggcctcccccagggtcactgagtaagtggcacagcaaggtggaaactcaggcaggctggctccacagcttatgctctcaaccactgtgtcccaacagttgaacaaggagaggggcacgaatatcaccaggtatgacattagctaaattgaaatctggtaatagatgtgaaacgttaaaagaaaatcatagttccagaggagggagtattacattcagaccacttgagccggctgggatggtggtgaaatggcagatgtggtttttggggcccttggatgctgaggagtatgatgggatgggggatctggggaagaacattagaatccagaaactaaaaacaaggccagaagtcaggtgtgaccagagcaagtagtgcagatgatgtgggaggaaatgtagctggaaggcaggttgaagccacatggaggtcttgcattaagtcttaatttaaataatagtaataataataataataacaaacacttacataatacttattaagtaccagacattattctaggtgttttctgtaaaacttctttaacttttatgacaacccacaacataggtgtaatatattccccatttttctaacgaggagaccaaaacacaaagggtttgtgtaacttcctcgaggtcacccagctaataggtgagggagctggaatctgaactctagaaggctgcctctggggtccttgcccttcaccacctcactgttctgccttcaaacaattggatttggaatgtagtagaaaagtggtaaaagcctgcaaactctggagatagtacctctgcacagaatttgaaatgtactggaaacaatgaactaatctgcaaaaatggatagctattgctaatccctattttatttttttaaagccattttattggggtatgattgccctacaaaaagctgtacgtatttaatgtgtacaacctgagtttagagatacatgtaccttcatgaaaccatcacagcagtctatgccataaacctatccatcacctccaaaagttttcttctgtcttatttattataattattattattgtgataagaacacttaacataggatctaccctaattcctactttataataatgaaaatgtcaagtcacaactttgaaggccccagtttaaaagtctggatcagaatccaaaagtccttgctttccagacatctcaaatctttaaatcataccttttcatggatatacgtctggggaaggaatgttataatccttttaatgtattaatagtatcacaaaaattgatttctccaaagacctgaatcgatgcaaaactgagcattgtgaaactgaattggagttaatgaaaagtctgtgcctaaatctccttagtcagttctgttcctaaactaagcctgttatgagtactctccatttttatgggctgcttatataaaggcagcttcaatttcagggcaacattttttccccctactgtgtaattctgattttgtccatttacatatgagttagaacctcttaacttgatgaaccttggctctaagacatcagcttgactttgaagttgtaatttgacaactctgtgaattagagttgaagagcaaataagaaaggagctcttattgatttttttttttttttgagacggagtcttgctctgttgcccaggctggagtgcgatggcgcgatctcagctcactgcaacctccgcctcccgagttcaagtgattctcctgcctcagcctccctagtagctgggataacaggggcccgccaccatgcctggctaattttggtattttttagtagagatggggtttcaccatgttggccaggctggtctccaactcctgacctcaggtgatccacctgcctcagcctcccagagtgttgggattacaggcgtgaaccaccatgcctagcccttgattttgttttttaaaaaccaaattaaaaaaaaattgtttttgttcaagagcttttttttttttattttttttaagtaaaatctggcccagcatggtggctaatgcctgtcttctcagcactttgggaagccaagttgggaggattgcttgatcccaggagtttgagactagcctgggcaacatagtgagactttgtctctactaaattaaaaaaaattatccatgtgtggtggtgcatgtctatggtctgagctacttgggaagctgaggtgggaggatcattggagcccaggagttcaaggctacagtgagctgtgatcgcgttactgcactctagcctgggtgacagagtgagaccttgtctcacgtacacacacacaaataaaaaataaaatatttggtattgtgagcttacaagtgatattcattatgaattcatttaaggaatttagttatatctatgtaaatttgtgtataaataatttgaaggtggtggcacatgcgttaagaggaaatatctgttatttgttttgtcgctcttgtataaaaaatactaaaaggaaaagcaattctgcgaactctctggtgctggtttcccagaagttggcgtgtcatttctaagtgttctgagggagatcagtggcctcagtgtctctcctcagcgtgtcttgggatgatctttatcagcagagtgaagatttaggtccagataaaagggatgtttcttccaaattaaatgtaagcattgcttcaagccttttacagtgactttttacaaattcatagtgatttcttttttctattggacaagacagaacagaataattgttggatgaatctacggttctgtggttctgttcgtttagtaccatctggtatttgtatactcgggtggaattggcagtggctggttagatttctacttggtaccagcccacctcatattttctcagttgcaagcagtagggggcaatgttgagctaccagattgaggccccaagatgttagcctttcaggaaaacgcatacaaaaataccattaactgtcaagaattatccctgttgcttcaagttagctgtaatctccaagattccatagcacaggatatcagttgtgggttaacaaattcaacagcaatttaacataaaaagtacagtgtttggtgcacatttggattctatagcattagactaatccaaatggaatttctgagtgtcctcactttgcttccagggactatcttactcaaaattattatcattttagacaaatgattcttttttatctttatacttttttttgaattgtaaaatcgtgcgtgttgtggaaggatttctttaaatcaatgcattttgtctgttctgcaaaataacatcgatctcttttgctgagaaaataaaaaacctcagggaatatgtgcattacttttccccttttgcttatgagtaaagcaacctttatcggccctcgtaccagggaagagacttgcgctgtgatttctgtctttgtgctcttttttcactttgtggctgcaaggtgtagtctcaggaaggatatagaagaatggaaaatgagctttgaaatcgcttttcttccattaatggtaattgcttcacatgtcataaccagtcacatatttcaaaaagtttagtcagctgtctctaaaactcccccatcctccacttcccatttcctgtcccagaaaacaccatttttatcacactgtttattcttgccattttttctcccagcggatagttttactccatccatgctcttgtgatgtaaatgttaaaccttatatttgaatgacattctgataaaatatcacattttccctgaatattacctcatgaatttatgagccattaagcccaaagcaacataaccctttcttataacccaggaatttagtctggcctttcccctcctctttgctccctattgaggatggcattataacactataatactattcaaatatttgttttttattttaatttttttaaaacccgatgcacttcctacccccaccgcccctgccatccaagatgattgtattatgagaagactcttcaggataagagagagttaccatttgaaagaaactgtacagctgctttgctttctgggtaaagagaaatatgaaaagctgaagtctcctgtgaggtgggcaagtcttgctgtagccagagattcaatggataggccatttgtctctcagggtctggtatcgctctttgcaaaactgacatttattttacctataaaaatgttttaacactatcaaattcacaatgatacagaaaagaatgctaggtgcgaaatcctctaaattgatgacatttattcatttcctattgaccttaaaaaaaaaaaaggtcaatttggtataatccagtggaaatattcgacaatcgtttccagagtaaacattttcgaaagtagtgatgatttcgatactggagagaaattcttcttgctgttttccttggttttttcttttagaataaaaagtagatcctgatggttttgaatgttttgaattgcgtttcctgttctgacaattccttgtgctgttatagcaatgcatttatatggcagttggccttaataacctttattgactttagtgggtaggagccaagactggattattttaatgtatccgtttggaaacagtgtaaaacacaacatataattatgttaggtaagctataggctacatttaattctatccatttatgttaaaatttggcacaggagagcagagacatgtggaaaatgagtaggtgttttatttaataatgtaaccagtttcttgttgttaaagttttaagagagaaatgtacttaagaaggtaaaggttgtgcctgacaagttagttataatagtttaattttaagatgagtcatgccttttcccctgctattttggcctatgtaaatcatctgggaaggcccttgccaggagcctgcccatggctgtgtggatgagtcttcctcagcataggttacacttcatgtagtttacatagtcatagggaatgactgagccgagcagtagtttgtttatttttggagagattaatgaagttctcatcacagtgctttagattaaattctttaaaactgaatacaggaacaaggctgctttttcatttactgaaatttttactgagtatactggtatttgctattgtattatagttcaattagctaagtttattttaaacttccttctaggattgaagatttttggggatgtgcagaagaaagtgatggaaatataaatatcgaatttttttgtttgcattaatgggaaagtcaccaatttttgtgtgtgtgtgtgtgtataatttttttcacccttcttttcagtgttaatgtgcacattaagttacatcagccaacataatccagtctcccatttttcagggttagcatttctgatttaagagcagagtatattatagtaatttaggatcagatgtgagatgtctagtggttttaaattaaaatgtaaattctcttttttgactggggcagtgctgagtgactcaagataagcacagattagaggtggataaagagtcataagcatccaaaaattcagtttctgaaactggtgtgcaggcactgagttttaggacctttacgtttagctttgaaaatctggaaaaacgaaaaagtcacttgcagctggagcagcttaaaatctttggtttaaatctttggtttttggttatcttaaaggtgttcagggaagctcggttctttccattctccttcctacccacccactctaattccccacccactccaattccccacagctatattgttctattaaaagtaaaacatctggggagaaattttacatgtaatttagcagtgaatttcttataagtttttattccttttttgattatcttatgaatttcagagttttccatttttttccctgagtgtctgtacctttagtaaggaattttacaagaaagtgttgtgtatcctgtctttttgggaaaaaagaatatacaattccaagagaattcaggcttaagcctcaaaaacacagtgtgcttcgaaagcacaaaggactgtgtttatgattctctttgaagtgtttttgcaactggataaggaaaattttagaaaccgtctgatagtgttcagggtaaatacttaaacccctttagagaatttcacacacagatactgtgcagcagaaaaaagggatacttatgtttcttaaagctgctacagcctacagctttgtacttaaagacagaggtgttgaatagaattctactgaggatacatccagtgacagtatctccaggaacatcagagcaaaccagtgggtaggactttctgtttttaacccttacatgagctgtgtgagagttgagctttactggtaccaagtcctaggatgtgcctggtacatctcaggaatgttaagaggatcgttcctagtgcctctgctctgcacacaataggaacaacactaaaaatgctgaagatgctgagacaaagtgacaggagctaggaaattccaagtgacagccttgccatctctcttaactcttagtgtgtggagagaaaaactggagtaaacagccagggtttgtgttttaaccttgtttctgtaggatttggctaaattttgacaaccttcgttaaatatacacacgcacatgtgcacacacacacatacacacatttcacacattctatatgtaaagaaaaaaaagatgaattctgctgctttaaatagttttaaccaccctgaaattcaaattgatgtaaaggtgtgaagatcctgctattttccctggggtgctattttagccttggctgctagaattcattttggattgctttgactagcagactatcatagcatttcagatatgaattaagaaaccctggtgcaagattggaatgtcagaaatttctctttttcctggaaaagatataacataaaacaaattatgtaacttatttcatctagggtttttttttttttgtggggagcatggtagagggattaaattcagctctagtctgttatttactttattataattacctctgaaatatcctagaagaatctcagtctagaagaatgaagtagtgtacaaaataataataataatcaccagacctacagatttgaaaggaaaacaagatttccaaaggatgtcgtgccatttatttggaatattatcaagatgttagaatctttttcccccaagttggttaatgaataatcactaaaactgttgcctcttgaaaaatattgttatgatgatccaatgagaaagtttgtaaaatataaaacatacataaatgcaaggtatcaccagtattgattttaaaaggaagcgtggagagtcttcaactgaggaatccttacttcgaggccggttgaccgagtcttccttattgacagcatccctttcctttcctaattttccttcctctggagctggggttcagtccaggagctaaagggactcacaacaatttggaactcagcgctcctcttgcaatgcgtctatccactgtgggttaaatactttgagaggctgggctgggaatctttccatattgtacagaaatgtctctatggagaaatgtactcccagtgccaaaaaatgacttacagagagccccgggaacacattaagttggcccttccgtgccttatggtaacataaccaccatcctgctccctcctcattgacatctgcaaaataatgacccttttttaaccaaagggaactgtgatctattttttttctgtattcctgaaaggatctctgtgattatttgtagatgatatttttaatagcatgttttccctaacaagttaaatgtgattgacatttttttttgcattttctttgcatgatctcagtccatctggaaccacctgtgacagtctcaattgtaaatttttccttcatatgtataaaaatctcaggcagatcatctcctacttgtttcttttaataccgctcaataaatctcctacttgtttttgattgacaaaattagctttcaactaaaaatctggagtcttcgggcactattcataattaaattttaatgttttagacatatctgcatagccatatctgcattggttataaagacttagagctggtggtagcttgagcatatatagccctcttattaaatattattaattgaaatgacaaattatgaaatatccagaattatgcgtcagatgttctttaacagatgttgggggattaagaggtttcaaattttacttgatgacataaacttttcatgcagttagcagtgacattttttaaaggatgggagtggtggcatataccaatgcttgtaatacattaatatgttcttgatactgaagtctcatgtcctggatacctgaacattgtttgggaagggtgggcagtattcagccatccagtaataaatatctcaaaggtaccaaatccaaaacccaagttttgatttctgtagtccctagtgtttcacagttcagtaatttgaactgtccagttgcccagactaaaaccttggagtcttcttgatgtatctcttgatttatcagtgaatccagttagctctactttcaaaatatactcatgacctgactacccttcactacctcctgtgctaccaccttggtaaaaactaccatcgtttataaaatagcctctcaaccagctttcctgcttctactaccctatgtccatcccagtcagaatgttcctttgagatacaagtcaggtcgtcgtttcactcccctgtttcaaacctactatcatgtttagaaatccaccttccttgcagtggcctaatgccctgcaggatctgtccattcctcgacctccatcagtgctccccctctttccctcccctaatgtctgccttactatgtctagaacatgcccagcccactcttgcccaggatttttgcatgtgccgctgcctttgtctggaatgtctgtccttctgtaatttacatgactctctccctcatttcattcagatctctgctcatgtcactttcttggagagagttgctctgaccaagcactctctcattgtagcagggccttactcttttctactgtactcttaacactttccaccaactgcaattatcctatatatccatttgttgtctgcctctacctgaaataatctccatgagggcagcagggacttggtctgttttagtcactcttatttccccagcctctagaacagcatctactgcataggaggtactcgacacatgtttgttaaaagaaagagttcacgtgaggtctgtgttctagtcctgccttttcctcccacccatgttgatcagtgtggccttaaatctttttttgggacggtcttactctgttgcctaggctagagtacagtggtgtgatcatagctcactgtagcctcaaactcctgggctcaagtgatttgcccacctcagcctcctgagttgctggaactacaagccatcatgcctgactaatttatttttatttttgcagagacaggttcttgctgtgttgaccaggctggtcttgaactcctggccttaagtcatcctctcaccttggcctcacagagtgctgggattacaggtgtgaataacagcacctggccaataaattctttttaactttatacattttcctaaaatattacctcttattacctgcttcacaggaatatttttgggttagttttattcttaaacaaacataactctcacaataataccccaaaacgtctttaacttctttttaaaaacaaaataatactgagggcacagaggacagtcttgttttatgcctctggcatttatagctgagaagattgagcaatcacaggcaaacaacttatgcaaatatggaaaatctttttttttttttaatgagaggcttaagtaggttattagtttcccagagtaccagtgttgctaaaagttagaatcatagtgttttgtcttatttgtgatcatccttcatattttagatttccctcttctggaaaaacttagtaaattgtcacaaaattaaatgacttctccaacaaagcttggactttcttgttacaaattttcaaaattatatagagaaagcagcatggactggacaggttttgggcacaggactagggaagtccctgaggagtaaactgacttcctctagacaagctgaaaactgattaaaatatttatcatcctttgggtatgcaatagcttttgatgatggaaggcatattaatattcatctttgctgcttgtctacacttcagacagatcccaggaaaggatgttcagatgaccagttttctttcctcaccaggagtccttgagaaaccagtacagcttggaaccaagaaatgccttgtgatgtggattgagcttttcctttgggggacgggaataggggaatacaaaccaggggagacctttggactggaaagctttaaaggatgactgctttcacacaggaagtcttttgctagaacaaaggaaaaagtttggttgtaattctataagcagcagaactattattgcttatctgaatacatgaagctgacttcattccttaggtaaagtcggaagattgaagccttataaaagattttgatgtgaatgccactgggggctgaagatttttcttcctccccaccaacccaccccaccactttgttgtaggagagaaatcagttgtgtttgtagccgatgctcaggtcttctgactggttctagagtgccccatctcccttttgtcctgagacagaattcgaatgcatatggcatccacatagcctggcataagtagcacagggtggccttctgggattctcaggatctgtcttttaatttttttttctttaatgtgagaaagagtctggctttattagttgagttaattaagcagtgttgttttttgtctaggttgaaatagccttgattacatttttggatgcaaataagacctctgaaagaactcgatctttatatgagcagtctgaaaaatctgaaagttaaatagaatattctcaaaaaaagggcaatgtgttaagactcttggtttccgtcttttaaatctgaaaattcagaatcctcttctcttgcatttcagtttttattattccacactactgagatattttgatgaaagctagccttaaacattggataataattatatttgaaatctattttaatatagtgacatcagaagtgctctttcttcatcccagtcatttaatcattcatctgctcctttttttttttttttttttttttttttgcagataagtgtggagttatacaaagagctaggacttatgtctcccaggttgataaggcacaaggcagtaagtaattcagaggaagaaaaaggagaagagcagattctgacagaggcctttgggaatacgaaggattttgatagatggagatgggtggagaatattcaaagatggcagaagcagggccatcgcagtgggaaaacacagacctgctcgcaaacttgattagactggatggagtttggtttgtgtgagtccagcagctagagataagattaggaagattagcaaggacctttttttctctaatgcatttctttgcaaggtatggcactttcaccccttaatgactggcttcctatcaaagtcatgggaagcaaagtgctaaacatgtgcaactaaaaataaaatgaaaaccgtttgattatcttgcacttgcaaaggttttactttgaaagcaagtcaaattcagttatttgcactactttcaagacctgtctgctttgtgagtacagcaaacaagcaacaccatacatttttagaatgagaattacaaatgagattaggtaatttttctaccaagattctttgtttttctctgataaattgaataccagcttaataattttggactttggtcagaagcaggtcttcccatgtatgaaccacttatgattctcttccttgttaggaaccctaagtgtatttcatttgatcttttgctattagagttgtggtttggaagaaatgacatcttcattgcctcttgtccaggtgacagtcttgtgaactcaatacttgcataaaaattattttgaaataaagccaaagtgtcattcatgagctatttgatttggttcaagagagtggatgtggtcttctctcacttccactgctgaaatagagtggtttctttcccacacatacctctccactccttggctaacagtcccacattagtgattgtgcactctctgctgtctctatttgccattgcacttcagcttgtcagtcacaccaattgaaagactgagtaaatgttcagaacgtaaatggccgttgttcactctggtctttcccacctttgcacataaatttctgctagaccctcatgttttccctctctatgtgatgctgttattttccaatgactggttttattacttctaaggcacaagatgttaattgttgagtgagtaataactctcagtttgttcttcaaacgtgggcttctgaaagattgcctttactttgattctgcttaggaatctagggtcttggggtaaatttagaggccactattctccttaaatgatagtgacatagagaaatgatactatgggactactgtttcattttaccaaagaaactgaagaaagtcacaccagagggtcattgctcccctagagaacaaatgggcttcaggctttttagaatgccttcttctttgatatctcattattgctcataatgccagagaaacaggtaacgtcggcatagtgatattgggcattgcttaatttctttcaaggcctgaaacatttatcctctcttctttatatattaggtattcaccctaatggtactcaaactgctaggctctgacaagctgaggtccaagtgccatggcattcaggaatgtcaatgttggaagggacctgagaggtgatcatcttctcttcctttttggaaaggaaggactcagaaggatgtaggcttttctggagggcatagagccagataatatagaaccccagatttcccagttcccagttcagtgctttctactactccctaaatatccatggctgtgcttgggatatttctctgatgcattcgccaactttcaacggtgtgccaatagcaaaataagataaactgagtgtttctctggaactttttctctaccctgtgtttggacctggcatatcaaaatgaggctctctggtgttgagatggacactgtttttgctcacccagcattcattcctccttctctggcagcatcctcatgttgccttgtggagccattttcttcattggctagagggtgaggtgcattgtcttattctggctactccatgagcatatgacctgagccagatctttcacatgagctttctcagagctgtttgcttataaatatacatacaatatcatagacacaggatgcagaattcaaaagttatcaacgtggccgggcatggtggctcattcctgtaattctagctcttagagagactgaggggcgaggatcacttcagactaagagttcaagaccagcaacatagcaagaccttgcctctacaaaaaatgcaaaagacttagccaggcgtagtggcacatgcccgtagttccagctactcgggagggtggggcaggaggatcacttgagtctaggagttggaggttacagtgagctgtggtagcaccactgtgctctagcctgggtgacagagtgagaccctgtctcttacaaaataaaaataaaaacaaagttataaaagcctatgctgtgaaaagtgtgtttctgtcccctcaatcctccagccactcattcccttcccaagaggctagcactattcttagttctttccatacctttctagggatattctagttttttttttttttttccttgagacggagtcttcctctgttgcccaggctggagtgcaatggtgcaatctaggctcattgcaacctttgcctcctgggtccaagcgattctcctgcctcagcctcccgagtcgctgggattccaggtgctcgccaccacaccaagctaatttttgtatttttagtagagacagggttttgttatgttggctagactagtctcaaactcctgacctcaagtgatctggccgcctcagcctcccaaagtgctgggattacaggcgtgagccactgtgcccagctaagatattctatgtagttacaaacgtttatgtgttttttccccacatggataacactatgtcttagagattgttccaaatttgtatgttcttttaaattactgtgtagctttttattgtatggttccataacttatgtaaccagacttctactgtctttagtcttctgcttttacaaataatattgtagtgagtatcctaatacataacgtttttcacaagtgagatctatggtaattaatacctaggagtaaaattgttggatcaaaggatgtgtgcatttttaattttaagagagatggtcaaatgccttccatagagtttgtagcagagtttatatgtgtgtgtgtgtaaatgtgtgtatttgtagatatatatactatctatatgtatgtatgtagagtttatatacatatataaatgtgtatatttacatatagattagtttatttacatatataaacatagacaatatacatatatgttatctatatacatgtgtatatgtatctatatttacatatagatatatgtatatacatatacatatatgtacatgtgtacatatgtgtccatataatgccagtttcccaacatcctcaccagtgcagtgtatcatcagacttttttgcaagaatgattggtgaaaaatggtgccccatttccatttgcatttctctcattcctgttttactgagaaagaaactaaggctcagatgtatgaaaagatttgtcaggtcataggagtagggagcaacagagctggggtttgcactgaggtgggagcaactgttctcttaattgctataataatctttacccaggctccattctgttactgcaactgaagaatcccaatacatatagcggttcccatgaggaacacccatctgtccttgactggtaaatgtgggaaggttgttctctttcaccatggacttgtgcgtcaaatcaactgatcagtctgggtgatgggtgcggttagcgtgacatgcagtgatgttattacgtggtggaactgagttccacacgggatgtaggtggccctttatgtaccctgctgagttctaggcctttgtgctataactatttttggcaatggaaggtgaagggagggctccccatccctggaaacatggcactttgcctgattttctgtttaaagttatgttcctgttggaatctgttcaggtctgagtttcagttgtcaccttctgatatgatgagcctccttggcctctcctgctcgcctcgttcttcctccacctgtcagtcttcattaggatcatttaaacactgactcattctctgctctgggccttttcctgcttggctatggaactgcaggttgaagcctttaccttgcacacatagtttgttaggtaagagttttatttcaagaagactttgcggggaactgtgatgactggggagtggttagaacaatattttctaataaagacaaggacgaaaagagatctcagcaggggaggagagctttctttgaccccttactatatttgagtgggtggacactaattctcaggagttgggggccttactagaccacatctcttgctgtgttatctcatgctatgttgtaaagtgagcatctgttgctggctgtatgacccatgtgatcagccactccatcacctttgaagtggtcaggcttagatattcttgggttaagagctttagctttcaagttaatcaaactggggtttgggccctgacttcatcattttgttgtgtatgacagtggcagtcatatggagagtctcaagtttcttcatttgtaaaatggggataataatagtatctcccttagcagatggttgtgagatttgcctgagataatacatgtagtgttttgtccattgcctggcatcttttgcatttttgctttgaatctacttcttttattcctcccgccatcctgctaatttggtgaccccttaactttcacctgagttcctgttgctccttagactctcatcttaggtttgtgcatatgtataatccatgctttccattcagttctctgttcaaaagtcacctcacagtggccctttctctttttaccatgttttatttttttcctgagagtatttatcactgtccgaaattatgttttatgtgttcacctattacctgtgctattctataagcaccttgagagcagggactctgtctcacatactgctgtgttcttggtgcctgaaacaaagtcataacacaacacatattggatgaacaagtgaagaagcaaatgtttcatgggtgtacgctctctctgaggtgcacccttttatgctagtggtgctttgtttgtgatatttgttgaatgccttgctcttccttctttttggcgtaatccatttgaaaaactcccttattttaaaagattcaataattatccattactaactgcagaaatcttatctttttcaccttctctggaatgtaatttctctgcattagactctgtcaacattagcatctatatcaaagacacttcatgcaactttttaaagacataagcaccagctccaggcatcggggttcagtagccatagctctcgatcttggctgcatatttgaaacacctaggacaatttttaaaatttttcatcagttaggtcccacctccagagatacagatttaattggtctaagctgtgggtcccatgtgattctaatgtttcaccaagttgcagtatggttcaaaacctcccaagtaatcctgacatgtgtttagggttgataattactgttcaacaggcacctgacttctcaccaagttagatttgattgaacggacgaatatatgaacagattagcgaatgaacaggaaggctccctcactttaaacgaacagagaggtattgagtgcctgctgtgtttccttcattctgtgggggactcgggagggaaacagctatgtttatgattcttatgtaaggtggaagatgatgttgataactatagtagaaacagactatgaaagcttggaagatggtaggatacatttaggtggatccgatttcaaagcttcacagtgaagcattttgagttgattcttatagaatggagagaattttaacaggaggatggacatgagaaaagagtggctatttcctatggagagaataacgtgtagagtggtagaagcaggaagatgcaggttatataaggcttctaaagtggaccagtggctgtccgttcccccaaactagcccccttctagagttccctaactgaagaagcagcaccactccacatccaggtcttcatgccagaaggagaggaatccttcttgaaacttccctctctccaccccaggtaccctgtgggagaactcttacctttgaaatacctctcaaagttgtctgcttttcatctctcctgctaccagccttcctctgggctattgcagtagcttactctatggtctcctatactcttcacacagcagccagggtaatattatcatatgcaaatctaatcatactcctctctgtgtaaactcattaatgggttccacttgctcttaggataaagactaaaatatagatgctcctcaacttacgatgggtctgtgtcctgatatacccattgaaagttgaaaatattgttaagttgaaattgcattcaatatacctaacctacccaacatcatagattagcctagagtgacttaaacatgctcagaacgcattagcctacccttggcaagatcatctaagacacagcctattttataataaagtgttggatatctcatgtaatttattgaatacagtacactgtagagtacagtattggtggtttgccctcatggtagcttggctgacggggagcacaaactctctgccacagcccagcatcgtgagagagtatgggactgtgtgtcgctaacctggccaatgatagaaatgcaaaattcaaagtatggtttctactgtgtgcatatagcttttgcaccctagtaaagttgaaaaattgtaagtcagacaaaccatcataagtcaaactgtcataagtcagggactgtctgtcctttatcctcagcccatcttttcctcctcacctttcctccaaccccttcactccctgtattcctaccacaatggccctttctcaatcagtctaatcacatcatgctcccttcttcttcagggcctttgcacacgtcatttgttcttcctggaatgtcttctctcaccaagagaggaatatatttctactcacttttaagataccagctcaattactccttcctcagtccagactcccttgatctgtctgactagatcaggtccctgcactatactttaccattactctcatgaaagccatgcttgagagctcaagctttattctggaggcactgagattctatggcagatagagtttgagagtacttacctgtttcgtgaaggtccagtgctgctagagacattaaagttgctgaagtggtttttggtcatataatttgtgaatcttattaaccatcccttgacaaagaactgagaattgttgatcatattgtaaaatagaatgtaaatggccatgcagtttctttgtatagattctccaaattattggaatatgagccaattccatgggattaatttaggtcctattatctgcaataagacatcccttgtcagattttcgttgtcaggggcaagtctaaaatgtccaaccattgcatgcaaactcgtagtaaagccattgtctagttattaacaaatgatgagcaggtgagtgaattgacaggaattattcttttgggatgttgcctctggcagaacctcagttatggcctctgtcattctcccttcctaatttcattatcttccaaatattattgacctcagatgttaagaaaggtccaggttcctgggggtcggcacatcgttccttcttttgccagatataagaaactttggggaccttggctaccagccttttcctgtcaggaaggtctggtgccatcctctttgatattgccctgtgcctgtctaggttggcagtcttgtgacaaatcagtacctgtcatggcccgtgggtactttggcacttcagagccatgcagaatgtggacagtgggtttggaattgtcattgagatgccactttcttattcttcttgtgttggtgcctagagtcacaatccggcctgaagggccaggaggttttctggcccagggtagatcccccttggcccacgtacaagaatcttcatgctgactgagttggaatctcctggtgagaagtgatttgttgtcctgatgagaatgtaaacacttgctaaagttgagtatcgtttctcatgtgagttctattatagccttctgtgtttataaacatgtcttgagcatgagggagaaatgtggtaacctttgagtccccaagaaaatgttcatttgttttctctgtgggctgaaattaagataactcagcatccttctctgagcatcccatatccctcttgcttttcctagcaggcctgggatgatgcccagtttgccatttcctaattgttccatcctcttccagtagagtctgttatcttttgaaaaagtacagttcatattcagcaggcatctaccagcggggctcaaagtccagggaagtcctcagtccagtctaacaaactgttattaaatttttttaaaggtttaaggtgtcgaacatttgagaaaacagagttgctgcccttgtgctgctcacatgtgtgttagcacatgtaacagacatatacatgaataaggcatgatgtgcagtggcaaatgagggggtagaaaatacatgttctgagggtgctgcagagaacagaagtcagattcagaaaactgggcaagactttatggaagaggagtgcctttcaattgtgccttgaaaggtgaattagattttaacaggcagagatttggtgggtgaaaaagagggacagagagccccgccttttttttttttttttttttttttttttttgagacagagccttttttttgagacagagtctcactctgtcacccaggctggagtgcagtggtgcaatcatggctcactgcagcctccgcctcccaggttcaagcgattcttctgcctcagcttcccaagtagctgggattacaggtgcccgccaccacgctcggctaatttttgtatttttggtagagacagggtttcaccatgttggccaggctggtctcgaactcctgacctcaggtgatccgcccgcattggctttccagagtgctgggattacaggtgtgagccaccacgcccagctgagagcctctttttttaaacaattttttttaagggacaggatcttgctctgtcatttagactagagtacagtggtataatcatagcttactgcagcctcgaactcctgggctcaagcgctcctcctgcctcagcctcccaaatagctggaagtatagctctaccaccacacagtctagctactatgcccggctaatttattatttgtggagatggggtctcactttgttccccaggttgggacggagcccattttagacagtacaaacaataggcacaagagggatggctctgtaacgttagtagggcatatttgcagaaaagtatgtggtgccttgtaaccagtacttccggtacctaggtggggtagaactagagaacaagtagaggggggagaatggggccagctgatgaagagctttgaatgatacacttagaaatttggcctttgttctggagacagtggttggagctggattcaaagatttttgagtaggaaagtgatccaatcgacccattcttcaaaattagaactggtagcagcattgtggatagactagagaggagaggctggaggcatggggacctgctgcaaaaattttgctgcaaaattatgaggttctgaaccagggcaataattggagggaattaaaaggggtggtaaattcagagtttttgttgattgttagtttgagactcagtcttactgtgtcacttaggctggagtgcagtggtgtgatctctgctcactgcaacctccgcctcccaggttcaagtaatcctcctgcctcagcctcccaagtagtggtattacagatgcgcaccaccatgcttggctaattttcgtaattttagtagagacgaggtttcgccatgttggccaggctagtgtcaaactcctgacctcaggggatccgcctgcctcgacgtcccaaagtgctgggattacaggtgtgagccactgcacccagcctgttttgtttttagataggtacatagaattcaccatcagtctggatgacagagctgagagatgatgaagtcacaggcaattttacaagatttcttctagtcttagttattagatggatggtgataccatttactgagctacacccaagaaggaagtttaggggcaaatgagtttgagcagccggtataccgaacatctcagaagagctgaaaataccagtttggaacttggtagagacgtcagagccaagcgtagatttgggagtttgatttatgtctgcagtaggcattcctttcatgcctatcatgtgccaggcagtgttctctcatatgttaactcaggcttgaaagcacttagcacatggcaggcatctccacagagacagtggctgagcgattggagtgagtaagagagaatgtagtttcaagagtaaaggagaacaaagtagggtgacctagtctgaaggacaggcgcagaacagtcagtggaacagccagagatagcagcgagagaggtgagaagaggaccaggagtaggtggtagaatggagtggaggaaagtcagcgaatgtaatagtgtcgaaccctgcagggaagttaagaagtggccataccgttgcattcatcatgggaagaatttcagtagaatggtaaggacaggaggacaaggtgggggaagataggtgaatctatagatgcatttgtgtcatctgatctgaggagacatttctcagaaaccattctgtgtggcactgatgtttacaggtcaacctggaggttcctgagaggaagtgcactgtagccagacatgtggtatcccagctagctttactctgttctccagaaatcagcctgtaaacattcagttgcctggtagctgactaaatacaggctaacctaaagccttaaacattttaatttgcaaaacctttgttgtattaaatcacaaatgggaggcaatttagcaatgcatctctaaaattgcactgggctctggccgtggttttgcaatttatgttgaaaacgaaaattgaactctgtggcataaaaacagattgttgattttgtgattaatttggtctctaaggccaaggaaactgttaatgctgtatatcagttataaagttgtggtagtatttgtggagcaaaatgaaaaatcaatatcgtaactacaggatagctcttttaaaatccaaggtgcattttgttgcaaattgcatggaagaaactgtcccccaaagggacaaacataccttccttatttcacaagtgtgtgtctgttgtggaaaaacagaggaaaatggttgggcattattacagtatagctgggggtactaggagaaggatcaaattgttcaatttagagtaaaacctcacttacagttacctgtgtcctaaggcaacctccaggagtaatctctaggagggttgtgagtcagaagtccagatacctgggtaacactttagcctctgctaatcacttgctggtatcagatgagcctcttcccctccctggcgtgttttgtggttttatgtgttaacttcagagatgcactgacatgcgtcagtgaaaaaggagtgtcttccattagcatcattatgaatactacaccaaaggggtttgtttatgttttccattcctagaagtgaatagacttcttttctattaagcttgtgtatttagagaggagtgtggggaaattctttcttgttttgccttttgttttgataaaagcaaatggttcccactcgccgtagaatcatcatcaacagattgcatggggaatgttgaggttggagcctcttcttaatggggattttgagaaccaggacatgacttgttcaccggttcatttctgctggccatgatgcttagatgagaagtagatctctcaacatccaggcacatttgttctgcgattccacctaccattttcctgggtagtgctgggattaattaagtctgatacgccatccagttgaaatttactaccagcttcttagcctagtatatattatccttacaagtcaggcctcaccttgaggtcagaagaagatgcagcttgttcaagaaagaagtgttagtggaaatacgaagagttccttccagtgaactgtgcctcaagtggcctttgtaaactgcttctgttctgtgtgacttataattatctgagagctgggggttttgtggtagattttctttgatgtatgggcagtggtggtaatttgtttctttcttcccccttctattttgctttgcctcatttcaacttaagcaatgaattgtgtggtcttttataatatagagattagtgtagccatttttagccagtttttatcatctcccttaggagctgactctatgcaaaagaaacacttctgtcttgtcagaatgacggtgattaccccacagtttggatcatctccagcagctttgttccctgaaaagcgaatttgatttgatgaataaaagtttggtgtatttgatgagtcagagggcaggagaatgtccttgtctctgatgaggctcttacagtcagacacattgaacatcagggataaaataaaccttaatctctgaaggaaaaaccctggagcatgaaactgttcccactagaaatgctgtaaatcttgcaaaccatgtaggttttctgttgggggcaacatcaaagcccagtgactttagagattaaagtgtatttgacaagcaaaactttccctgtgccttgctctttatgagatttggcctgtctcttgcctttgtttcacctcgctatgacttcctttcttcctgagaagtaggaagtatcacctcaagtctggggtaggcggccatggtttgttcatttaaagccactcgtagacctggcgcagtggctcatgcctgtaatcctagcactttgggagtctgaggtgggtggatcacctgaggtcaggagttcaagaccagcttggccaacatggtgaaaccctatctctactaaaaatacaaaaattagctgggtgtggtggcgcatgcctgtaatcccagctacccaggaggctgaggcaggagaattgctggaaccctgggggcggaggctgctgtgagccgagaccacaccactgcactccggcttgggcggcagagtgaggctctgtctcaaaaaaagaaaaaaaaaaaaaaaagctggtcataggccctggccacagtccctcggccttctcgcattgtcctgccccagtggaggacagcgtcttctcacgatcacttcccagggactctcttatttgtggaagagtttcagagccttttgctgactcgaagaagatcaaaagacaggaagacagtggtttgcctcagcttggactttagcatttctgtttcttttaaaaccatctcctgtgatgtcttagaagaaatacttcttctttctttcttttttctttttttttttgtcctgtttcaaattctgtttcggagttctcagtgctttctctttcacacattggaaataaatgactgcatttttgttgaaataattttttttttgcagataaataattgtttaacagaatagaaacttttcttcagtaacgtctttttttggaaagtaagttacaagattttgctttaaaaatacaaactatttttaaagaattgtactctctaaagtcaaacattcctgcctcctgtcaagtccctataagatctggtctgtggcaacttctcagggtggtcagatagcaagaggaggacagattgggaaggcaaaatggctttaagggtaaaccccacagcgtaaaatctcattactggaaaagcgctttgtgtttaaggataggtattcccgtgtggaaggacggccatggcgaatgcttaagggactcactaaaatatcttaaattgtctccgttaaacatgtagcatccttagaggtcagacagagctgaaacttgaacagctgtacaacaagcatctgagattgtttttaattgtgtttcctttctctaacagcagtaattcttgtttatattgtcaagaacctttccactgagcacaagcgcaccatacttgaaggtcaaatgcttaacccttctgcatggttacaatgaaaatggacccttttgttttcattaatgtataccccagccatgtctacagggagaatgggggccccaagcgttcaccaagctgaagcaacttattgtaaaagagccacaaagagagcatatttttgtttccatacaacagttgtttagcttttgccttgtgcacccaaccataagacggtatgcttacttatcaatgggcagaattttgggggaccattttgttcctttgacctgtgttactttttactgacccaaccaaattgcttaaaaattttccctttctgctgtcagtgtttaaagctgcttaatgtctctgaagtgatcccttctttctttttaacactttacattcctgtttatcacagcacctgttactatagtgaaccatgaaatcacaaatgctatgcagctcttattgaccaataatactttattaaatataaatagagtatcctcccagcttctgtatggtgtataaaggtctcagtatatgaagacaaatgcacatatgtccataggtgcacatgtattgtttggtgggcaacaatcgggaaaggaggatgttttatttatttgtcaggcaagaaatgtttctttttctgctccttaagagttaaccaaaactaaaggggccagttcagcaaacactaaatgtgagcctccaacatgaaggcatctttgttactgaaacaaaaataccacagcaggtggtagactcgaacacaggagggaggaggaggttcagttgttgcccatttttctaatcctttcagaatacccattgtctgaaccccaaagttaacatgttcctgctcagtctcatggagacaatttcagcgtgaaagggctgtgcccatcactggttttcgacaacagtttaatctttgggtatggaatgtgtaaccactcaacaaggcaggagaggcaattgtctgtctgagatgagccaataatatctgcttatcaaagcataaaactattctggatgtggcaagtcagagttaagtaggaattcatgccaaccgcagcagtagtttgcaggttttagactgtattaatcaagacagaaacatgacttttgttgtccttggggcagctcaaagcaactttgtggcaaccacactggctttctaaagctaaggctaaactctgcacagtctgcatctatttatatcaaggtgcttcagtggggatatagcttttaaaatggattcataattgaagttggaatattgttttcattccctaaaactgaatgaaatgtagtttataactctggacctcagagtgccctacctaagtgggaggcattaaaagatgagttaaggggcaaaggcgggctagcagactgatgcctattactgcttatgatgaagggtaccactatccggttcatatgcttgggtctctctgtgttctcattgagccatccacaatcgtttcttttattctaaatcaccgttggaatgatataagaaaatgaatgcagtataatgagaattaaaaaaataaatttgtaagaagtatagagttggaaatcttgttcctataaacgtaagacacaaattctaatgagcttatagatggtccgtaaatcacgttttgctcatgtgaacattgaacattgggtattctttcctaaccagagagaagctacgattctgctgcctatgccacactttagatggaatgatggcctcttttagtggcactaaatgtatacacagagcactaaacatatacacagagcagtatctgcaaacttaaggacttgtgtgatcttctggataatactagcactcagaagttaacatttcatctgacgcattcctttcatatgtagtattcataaatgtgaaaatagccttaaatcattattttcacccttgacctgggacactatagctagggagaatctctgggatatctggaggggagctaaggctcatcaactatttggtggttgtctttctgagtttaaaaaatgatgctgtttactgtgacctcaggtgtctgtctgtgtgtccaagtgagactgtagtcggggagagtccctgattggagtctcagtcaccagaagtccagtcaccacttcttccaccagtggagactgtctgtgaaccctagtctgtcagtgaaaccatggtcaagggcgtagcatcattaaccccaattctgccagccatccttactctgctaccccatgagaatctgggccactcattgaacactccaagcctggattccttcacttggaaaatgagtttgctgaagataccaacctgccgtgtcagtttgttaaagggaatacatgagatgctgcattcctgcctcacagaaagttccttatagtttgtcatttcatagtttaggaggtaagagagtgaactctactacccactgggtttaactcttgtccccactacttatcagctctgtgatctgaggcaagttacttaatatctttgtgctttgattttcttttctgtaagctgggataataataaaaccgatttcactgaattgttataaggatttaaattggggttacatgaaaagtgattaggacagggcttggcacacggtaagtgtaaaataagtaatagttattgttatgtttttgttattgttgttgacacatttctgattatgtgttttaggtagtcattgtgatgggtttttttttcatggctactattaatatgttaataaatgcactgatatttccagttaataggtcctgaattcctatttgagagccataccacaaaattgagtgagtgtgtgtgtgtgtgtgtgtgtgtgtgtgtgtgtccatctgtccatccgtcgtccatctcctctgggtaaatatgtgccgagtagcaggtagttctgacattgaagactctgtagacagtggcgtttaggcagggactgcatttgtcttaggtagatattatctaaggacaagtacagcaactctgcccgtgtgattttcactgaattatccttttctaccagattgttattttatttaagttttaatcgttacaatgtcagtagcatgagcttagtgagacatagctttgacctcaggaatcttaagaaaaataagattattcttatcttaataataatagaaaaataagtttattaagagtgggccgggtttgtggtgatatttgttagttatatctttgttcctacaggtctacattttagttccattgtctcaaaatgaaaagataatagcacagtcatgtgttgcttaatgatggggatattttccgggaaatgtctcattaggtgatgttgttgttgtgtgaacatcatagagtgtacttacacaaacctagaaggtagagcctactacacacctaggctatatggtgtagtctgttgcccccaggctataaacctgtacagcatgttactgtactgcacactgtaggcaactgtgacacaatgataagtatttgtgtatctagagatatcgaaacatagaaaaggcagagtaaaaatatggcatgataatcttatgagaccactgtcatatatgtgatctgtcattgactggaacatcattatatgacacacaactctatttagcgaatcagtattaaatgataacatgaagattatgataggcaaggaacaggacattctagtagagcagagtaactattttataaatcaaaatcaaccctaaaagcttaatcaaatttaacagttattttatgtcccccttggtcatcctccaccctgtgtatatgttgtatttcccagcatagattgtaagctcctagtggccaggtattgtgaccttctggatgtcttctgtatagcagagactcaaatgtcattgattggtttatcacatggcagtttaccttcagtatgttccattccatatgttctgtataaaccgtgctgggcctggagttagaacacctggtttctagtctgagctcaacttctttacaaactttgatattaaagagttacttaatttagctaagcctcagtttccttgtctataaaaatgtgattaatacttgctctacccaacacacatagttagtatgaggatcaaatgagatgaagttaatgaaagcactttccgaactttgtcagtttacgtatatgttagttttgggcacaggcgcctgatgtctgggttagatttggctctgttgcttactaatgatataaaatttgacaaattacttaacctttctgagtctcagttttttcatttgcaaaatggaaatgataatacctttatcttatagacttatttttaggattcagtaacatagtatatgtgagcagcacctggcatatagaaagcacccaataatgttggctgctgtatcattatcatcattatcatgagtcagaaagtgtcgaggttaagagatatcagcttacctgatatcagtgcactctgctaccccatgagaccctggggtaagactgaataggggttggaaaacagtgtggagatgccttaaagaactaaaggtagaactaccatttgatccagcagtcccactactgggtgtctacccaaaggaaaagaattcattatacaaaaaaagatactttcacatgcatgtttatagcagcacaatttacaattgcagcaatacggaaccagtccaaatgcccatcagccaacaagcggataaagaaattgtggtatatgtatatatgtataccaaatggaatactattcagccataaaaagaaacaaaataatggcattcacagcaacctggatggaattggagaccattgttctaactgaagtaactcaggaatggaaaaccaaccatcgcatgttctcactcgtaagtgggagctaagctgtgaggaggcaaaggcataagaatgatacaatggactttggggacttggggaaaagggtgggaaggaggtgagggataaaagactacacattgggtacagtgtacactgctcaggtgatgagtgcaccaaaatctcaggaatcaccactaaagaatttattcatgtaaccaaacaccacctgtttcccaaaacctactgaaataataataattttaaaaagactaaatgggggaaagagaggaataaagaaaggcttcatttttatgactcattttagtagatttaatgtgactctgactggctggtactttagatttatcctaaatctcagtagcaaaattctagggagaaaaaggagctaacacttacagactggctgccatgtgtcaggtactatggtaagggccttatgtgtaaaaactaaatcctgtgagctctctgaagtagctgctataaatatcctcattttacacatgaggaaactgaggtccagagaggataagtaacttgcctgtggccagcttggtcgctaagttggccttcagggccttggttcttccttcctgtgctaaagtcctcaagtacaagggagacctcctgaatcaccaaaaataattttttcttcattgcagccaaaagcagagaagtttatgcatcagctttgctctaatttgagtttttgtactgtccagatcgcagcctacatagggcacatataaagtgtagaatttgtgtgtgtgtatatataattttcccaaatctttcatttttagctatacatttctctcatgttccaaaatgctgtctgcttaatgttccaaagcatctccaactccatgtgtctagtatggaacgcgtcccttgtgactttgcagtggcaggggttggcatgagggatatactgtctttgtgcctcagttttttcatctttaaaatggagatgcttgatatatggtgattgctggatgaagtgagataatgttgatggaatggttgttggcatggcaggtcgtaagcactaaataaacatagctgttgttcttattgccactctggggggaccagttctctaggcctgggggcagtagtaaggtctcagtaggaccttctggcttcactctcctgagcagataaaatttccactagggctttggtttgggtattgctgaaagaggagttgggtgggtaggtgggtgggggtagatatatacaaaggagtgaattataacaaagagccttttctgcttcaattcttgtgtagaaaacatatgttcagtgatgcaggcagcagttgggttaaagacacactgtagggccgcagacaaaaggcctgtgcccttcctgcattcacaatgtttccaaacatattcacttgtctcacttgttagggactgagctgtcagctggatcctcttgcaagtgtgatttctttttcccgtcccctttcaaaggccatccctcccttcccctctcccccagtgttttacacttcatataatccagtgtgcccgacagaccacttcagcctttgtgctgctgatgtttaggggaaggagagaattgatctgatggagatcttgggtaacttttcacttgtccaaggatcggaaagtgctaagccacttttaggccaaacatcatcagtggctcaattatttcgtacttggtatagttagccgttcttcaccttcaattaacagttaggacaacgaacagattagtgcagtggaattcttagaagtagcgtctgggaattaggggcatgtgtgtgttgtggtggggttgggagagttcttgcttttatttataaagttaatagtttttgataaaaagataaagataaggcaaggcaccgtggaagtatttggagagaagtcagctgtcattctagtattaattatgtgaaatgtacaggtatgtccatgtttaattctagattcaggtagtattgctatgtgccatggctgcagtttgagcattttcattttctttattgaaggttttgtggctctgatggttttattttcatcagtgagactttaaaaagatatatttatgtatattactttttgtgatatatatatatagcataacagtattaggtataatacttttatgtataatctaccaacactactattgaggtaacagcgagctagagatttaaagaattagcatgctaagtacttccatcactgattactcttgggcatttcaccctcccaaaatggacaagtgaaaatctgcaaaatgggaattacatgatcatcatactttataaagcgtaccatagtaaaataaaaacagttttatcgatgatggtcaacaacaacaattttcttgtctttgtagagatcttggattgtgtcttcattcccatatcattgagtcagttttaatgctctcatttcctttttttccccaagagttttgctcttgctttctgtttcatgctattgtttattagttgggttgctcatcctgaaaagcagcagcatatcccaaggaaggagaggcagtaggcaggcagagaatttcccattggcttaaagctgtaaatgggttgttagctcattttagcagtggagcaattataatcctgctaatgaatacgcaggcaagtggagtttcccatatatggtgtcttctggtgtgaggataatttcaacacctaaaaatccacagacaaaaaaaaatgtcatataagtattttttaacagaaaatgccaacaaagtcatcctcccaatacgtgtcagaaccgacaaaggaaactactgatggtgttataacttttagtactgtcatctgaaaaatccttgaaaggaaaacactgtggtaacgcatacatattcccctcagactgaaagtaacagcctgcaaagatcttagtagtgggtgaagctaatagactgcaagttgggatgaattgcacctaaggtggcacctttctcttgtgcctggagtggaatgtcacccagaaccaacagtagaacaactgggaaataagttgatattctttccaacatcgaatggattcatttcacagagttggggaggaagtgagggtaataagagtgtgtttctgaggctcttccttccagcagataggttttgttttcttggttgtaaaagaggctaatgcttcagaagctagagtgattcctggactctcttggtaagactaattatgctgtttcctgctcccgtctgtgaatcagctttgttacatagaatgcacgtaatagtgacgaagagtagactctactgaagcaaaccaatctattaggctgcttggaaaacagagggagaaagaagaacaatgattttgtaaactccataaaggccaaaaaaaggctttcagtaagtatgcagagactagaaatcaaatcccatttcctatcataagaagcctgttgtttcagccgtagtagttaatgtactgtatgtgaaagatttaagactggttggaaagctctgcttctgttttattaggctgctattgaaaagccaacagcataacttcgactaggtgctttgagatttcttaatgggctgtcaggggcaagacaccagggctgtgctatactagctctttcctgtacattaaaacaacaggggccaaacgatcacatacagaagtatgaattacttgatgctttctctgttccatatggccagccatgtctttggcaattaatcatgtacaaaatcagtcgagtgctctctgaagcattgaagtcaacatttagttgtacctgtgccagtaggggcagtggggttgcaggcgtaaaatagcaggatgaggggctgctggcgccaaggcccaagcagctggcttctataaacaacacttttttttcctctttacctttctcccccactttttctttctttctatttttttttttctttccttgacaagtacatggggctgtttttcaccatcatctgaaacaccagcgttgccaactggagctctgaggtctagctttcgtacattgccccagcatccgagcttaaacgtatggggcaggccatcttttcccacagcagcctgaacattccagcggtcgcccacatgactgtccccgagagtttctgcagtggcaggcaggctgctgtggctccatggctttttgtcaaacagaggaggcagagtgatttctctactcgtagaaggagagagatgggagatatggtgtaagtgctttggggaaaaaacaaaaataagtagtcattcatagtcatggctgtgatattttaggattttgggttttgtaaatcaatatccatatcttttcttctgtgatatttcccccaagacttcatacacataatgctgctgccaatagtcctaataccaatttctaacatttatcaagcattttgtgtatgctgagcactgtgctaagcactttacatggattatttcatttactcttcacaagagcttcacgagttcggtgctattacttatacccctttatggatgaggaaactgatcaaagaaacattttccctgaattctttcctcatagacattcttgattactctcagctagcccccttagctcaatagtacatgatggaaaaacactaaaatatgtcttactggcacatttttgaggagtcatgtggtgaactctgcggagatgttcagtcaaataaagtgggtctttgagatgaactgaaccaagtgtgtctttaaggtgggaatgaaagcctgctttgttggcagcctcttgaagacttctgcctttgtgccttcctttcaagacagtggagtttatctcctgctttcctgggtgagtagactatgaagggcgggggaggggaaggaaggatgaagacagcagccttaagtagtccagtagacgtggcacccagtggtgacttggtgttatctcttagccgaggtcatccaggatgcgttttctcaaattcaggaaacaggggaaagaaagttttaacattgtgtaaacattggcacccccaaaacctcctccgggagataaggtaggcagaagggctgggaggaatgtttatttgttctgccacgctgtggatccaagcatgctggaaatctttggtggtgcccagtccagtttagaaaatgtgaaggcatcactcagcattgagccaaagaggcctcacaaaagagccatcttaaactgacaatcactaaatgaaggaagacctgagatcgacctttctttgatgggactaaggctatctcagtgggttctgtgcctttcttcttttttttctttctttcttttttttgtaaaaaaaaaaaaaaaaggaaggagagaaaaaaagtgttcctggacttttgaagaggggagccctggttggggcttttgacagcctgtggcaatgttgatgtgaggaaatagctttcccagctgataacatcttaaaccaagtttcttcacaagttgaacctttagccctcattatcagtcagagcatatctttgtaatttgtgtgtgcagaggggaaatacagccctaacatgagacagctatgtatataaaaagtgttgggggtgacatttttcccgtaatgacagtattacttctgtggtggtagtgaggatgggtagatggggaggtcagaaaggtacgcagttctgggatcctggtgtttaaatgccttttgaaattgcaagaacagtagtagattttttttttaatgaactctgaagagggattaccagccatatttgtagaatgccatcctgtttccatgcatttccttagacaacattctttgatttgtaagacggagagattaagtctgagttttggggttacaggcctatcagaagccgttgcatcatatcagagaggaaccaaaaggattaaagacttgtatagaattattagtaaagagtaaatggtgtaagtctccttttaaatttcagagtggttcctctctgaaaaccctacatgcaacaaattctgctatgatacagtggaattaggacatactgaaagttactgactgtagcaatatgccccacaagaattaggtgaattgctgagttttaattgaatccgttcagaattgggagactttttccaagaaagacaggaaacttaagcataaaattcaaggctccttagagttcttggcttttcttttctaatttgcattcagtctctctctctgtctctctctggctgtggattttttgctttggttttatacatgaagttttgagccaggagaaatgaaagactctgggaaattcttaggggtccttaatatgctgtgtgttgccagaatccaaactagttttctctactgaaatggagaaagtgggacttcttcctcctatacataacctcatattaggagggtatatttttaggcacgtccatccaaatgagtattgtccttttaagtagtcacctaccaagggcatatactcatttttcttgattctgttacttaaaaatagtttttccgaccccgttcttagactcatcttcaggaatagtttgaatcaaatcacagatggtttcacatactgtttttgaccttgaatagtgctctctggcctgatcattagcttcactccccagacatgtttcagcatgtcatttggcttcatttattccaaagtatccatcaggagtccacttccgtggcatgttgccatattaggcaccttggagattattaagaaatggtcatggacccttctggtctaatggagcccacactctggaagagaaaaatttaaatgaatatgtaagtgcaatggagtacgacatggtggtgcataaagagaatgatcagctccatctaatttggtggaaggacgtagtttgtggaagacttcacagaggaggtgtttttgagatgtttcttgaagagtgagtagttactggaaagttatatggcaaaggtacaaatcgaagtatagtatagaatagccatgtgtttttagggaattacagttttatatgaaacagaagatgatagaagataaaatatgagaagtaagcaggacctgtatcaaaagggttttttttttccccaggctaaggaatttggatttaaaaaaaaaaatcattttttgtgtgtgtcctccaaatgccaataaccgaagcatatataaacaaaggtgctctggtttaggtgggattttgaagccaaagctccttgtctccttggtgaccctaagaaacttcgtggaagcactggggcttcatgacgaaagcctaaaaaccactattataggtgatgctgaattatttaagaggaagtaacatgtttggacatatacttttaaaagatcactcttgaagcaggaaaattaatgaaaggggtgagatggacacagacagatcagtttggaggccattacatggtccagaagagagatgggcctgaactaagcctatggcagtggggaaggggtaagtttcagtcatattgaagagagaagaatcacaggattttttatgtttaggtataggcagtgcaggaaaggaaagggaagaagattagggtgattcttagggttctagtttgggttattgcattgatagtagtgcagtcaccactctagggaaatacggtggaaggagagcaaaaatagttcaaatgtggacaggtgaaggtcaaatcttatgtttgaggcagtgtgtttaaggaagatagtcagttgttggctgtatgggaccagagcttagtggaaaggtccgcttgaaggtagaagcgtagagatgtccgcagtctacagggaacccttaaagccattggaagggcagatcacccagagagagagcaaaccgaagagatgagaggaggatgaaaggtatgaccttgggataacaacagttcctcatcctagaatgaggaaaggcatacaggagactgagaaggaccagcttagtgtcgggcactggcccaggagagagaggtgtccactaatggagagagatcaagtgaaatcagaacttgttctaaaaataaaacccaccctcaaaggataaagagataaagattttccaccactagggatatgcaaaaagatatgcctctggcttctggtacataaaaattttatggttgtgattgttcagtggttgcctgatttcctttaaagtttttccacttaaagtaatagacattttcaggaatccctttgttaaactagcataacctagcacaaggtagattggcagagtttaagatgaaagtaaacaataataatcatgatggcatatgtaccaggcaactaatacaagaattgtggagaggttctgttattatcaccatttggagttatgggaaagacccacagctaggaggtgacagcggggatttgagcagccagcactctaaagaatatattaatacttagttctttctgatctggcctgcatttccatagatttctattgaaaaaaagtactaataaaatgaaatttagccaccaggacacgtttcctaatgaaatgaaatttagccaccagtgcacgtttcctaaacctgtgggggttttctcctgtattttgggaggaggggagggagaatgtgtttttggtaataggagactgtttaaaaattgttacttgtttgaagacagttctatgttactactaatgggaaaatggtctataaacatttcctggggaagtcaacccttgaaaagccgacactattataaggagtaaaaatatcacattaattgccctgtaaaaagaatgctcttttgacactgaaatttccttttgtgcaatgatttcttttcaccctaaattttagagtttgaatgttcaaagttcacccttccttttctaatattaaaatagttttttgtaacagaatttgtttttgtcgttaagttatatttctttatatttttactacttatttgctagatgtgtttacttgaaacttgttttctgcattctttcttgttttaaaaatgtgatgcaaatgaagtttttgagttaaattaaattttataaaatttacatacaataaaattggccttattttggtatacaaccctataggttttttatggtttttatttgtttgtttgggtttttttttgaaatggagtctgctctgttgcccaggctggagtgcagtggcatgatcccggctcactacaacctatgcctcctgggttcaagcgattctcctgcctcagcctcccgagtagctgggattacagaagtatgccaccacacctggctaatttttgtattttagtagagacagggttttgccatgttggtcaggctgatctcaaactactgatctcagatgatctacctgcctcggcctcccaaagtgctgggattacaggcatgagccacatgtcctatgagttttaacatctgtataaactcacgtaaccaccaccacaatcaaggtacagaatggttccatcatgctcaaaaattcccttatgctgcgtcttgcccaaccgaatccctagcaaccaatgttatgttctctgtccctacagtattgcctgttccagaatgtcaaacaagtggttttgttcactgagcataatgtctttgagatgctgagtgatggcatacatcagttgctcagccctttttattgctgtagtggtgttctgttgtatggatgtaccaccgtgtatttatccatttaccctttaaggaacatttagattgtttccagtttttggtgattatgaagaaagttgccataaacatttgtgtacatgtttttgtttgaacataagttatcatttttttagataaatccctgtaaatgaaattgctaggtcatatgctaaacgtatgtttaactttataagaaattgccaaaccgtttgtcagaatggtagtattttgcattcctcctagtagtgtctcaacttttaaaaacttaaatgctattttagatgctcttgggttggggttggcaaattgtgtttcgcagtgccttggggctttgagaagatgccccaaaacaaagggaggacttctaggtcctccataccagcttcaaagagaactgttccagttttgtttgttgtatatattgggagttgcatgtaaggatacatttggggagaaaagagttttatctgcaaagtgtttaaaaaccattgcagtagggaagtgcacccacaatgtgagatgtggaccacaggtgatacagggtgatgctaggtggcacttggggactctgcacatgaggaccacactgtgaggcagtgattctctcttcagctccatctgtttatgtgattatgtcaaggaagtcttcatttaaatctgctgcatcgttattctccaccacttgttaatatcttcctttacaaagagggagcatgctttagtctcagagccctcagcaagcaacagtatctctctagaatgaaataaatatatagttttgtttatatttacttttatgattatcttcttttttttttttttttttttttttttgagacagagtctcgctcccaggctggagtgaagtggcgcgatcttggctcactgcaagctctgcctcccgggttcatgccattctcctgcctcagcctcctgagtagctgggactacgggcacctgccaccacgcccggctaattttttgtgtttttagtagagacggggtttcaccgtgttagccaggatggtctcgatctcctgatcttgtgatccacccatctgggcctcccaaaatgctgggattacaggcctgagccaccgcgccaggccaattatcttctcatttataagtaccatttttcttttgaagtgaacttatagttttaaaaaatgagccaattatcatagtatcattttttctttttttacttttatctagaaattactacgaaaaatgagtcaatttaaagaaaaatattaaatactgtattacatagttcatatacaaatgtggcaagaattatgaggatgtgctagaataactgaagtttaggaaactcttgaacttctagaggatctggttatttaaagaaaccttagagtgaatccttttgtgaagtgaagagctccttgataaagcacataactatttcttagtttatccattttatgagtttataatttatgtaatagttcttaaaagaagatagccttcattgttctttgtttttgtaatacttatttttcaagtcccttctttattcactgatttgacagatattttgtgggcaatggggatacggtgttgaactaaacaggcgacatcccctttctttgtgaaactttctttcttacatccttcccctcttagaggctgttcagagcctatggaaaacaagggcccctggataaaatgtaaatgatatgaaaggcaaggaagaggtaaatgactttaaaaaataaacattttaatagattcacaggggggaaaaattttgttttgatcatgttagctagctagatgtctactttgtctttcatttgatgcatttttgcattttggtaaaataatatgtatccacagatataaccacaaactatgtgactttttttttttttttttttttttttaagacagaggttcactcttgttgcccaggttggagtgcaatggcgcgatcttggctcactgcaacctccgcctcctgggttcaagcaattctcctgcctcagcctcccgaatagctgggattatagacgcctgccaccacacccagctaattttctatattttcagtagagacggggtttcaccatgttggccaggctggtcttgaattactaacctcaggtgatccactcaccttggtgtcctaaagtgctgggattacaggtgtgagccactgcacctggccgataaagtacttgactttttgaggttcctttcaactttaagaacatgaagtagggtgtcacagacaaggagtagtaccgttgttagaatacccgctaatgctcagacctctctgaaattagacatcttttagattagagatcacaaattggtagctgcctaagttctattcagcccattggtgtttctcatttgacccacatggtatttttttaaaaaattttaatgagtttacaagatttacaaaaatcagtttttacattaaacacacacacacacacacacacacacacacacacacgcacataccagatttcttgtttattttgaaaattcatgaatctagcatcagtgagccagcttttctgaatgtcagagctggctggatctgaatagtgcgtgccttttttaggcagaacatgtgctgtctttcagtaacctctgcttaactcattcatgttatgtgcctggcccagtgagtatttgaatttgcaacctgtggatcctgggtttcatgcactggaattacctagagaagctgaacattcctccttgtgctggagggctgaaaatgttgttgccacagaagctgcttgagtgtccaactgggcatatcttccagcacagtagatggaatactgggataggaggcagaatcagggtccttttcctggctagtgtcaggtggattatccaggcttcttcacaatggaggtactattttctgacttacctgtttgtatcagttaacatttttgatagcaacagaaacagattctgatgtggtttttttttttttttgagatggaacctcactctgttgcccaggctagagtacagtggtgtgatctcagctcatgcaaactccatctcccagatttcaagcaattctcctgcctcagcctcctgagtagctgttattatatgtgcacgccaccacgcctggcaaatttttgtatttttagtagagatggggttttgccatgttagggaggctgatttcgaactcctgacctcaagcaatctgcctgcctcagcctcccaaaatgctgggattacaggcatgaaccactgcactcagccctggtgaatttaaacaaaatgggactttattgaaaggatattgggtgactgacactatcaaaggaaaagcgaatgatctggcctcggaaagttctggaaactagagatactctgaggaccatgggtggaaggaattaagggaattgataaattgcctcagcattttcccccgtttctttatcattcctctcaagagtctgaaatcctggaaaagaatcaatttggtctggcccacatccttcataggggaagataggacaccttggttgacagtccctctaagactttataccatgaaagaaaagactttgtaagaagagatttaggtgatgttgccagacaaaggggatgaggtatggatttaagcaatagaaacaacaaatgttcactactcctcttctcaaggttgtcatgaagatattaaatatgcgctgtcaaatgctatcaaagagtaagggagtagtgtttcaagttacaggagaaccaggttatgggtatgctctttaagtaaacaaatatattggcgtctgttagataaggaatatattgaatgacttagaacacagacaatttcattgaaattgtagtggcaatttcattccttttagcaattgctttggttataaaatctccaaagaagccacactaactttaaattataaaacaacatctataaaaatctaaagatgttctttgagatactcattcaaagaaatggtctttctgatttttgtgttcccatttttttctttgcaagatcttgatttgcaacaggcaaggaaaatgagtgaatcttcccccttcttcccccacaaaacattgctggcatgggtagaaatttaaagtaatgattcaaataagagaggcagagaaagcctcagctgggtggcaggaaacaagagagtgaaagtcagaggctgctcttttttaaaaaggcaaaacaaacaactcacagtgaagtgtacgtgaaaatcatttctaataatagctcatggtaggcaattcccaggaaaaaaaaaatcgttggtgtgctgagaaaattagagtaagaatgcgcagtatcttgatgtgttacttaaggcaatggagctttagagtttaccttatgtgccatgtacattgattaaatacaaaatatatgccggccatttttggccatcatttactgcattgatttgttagcaggggaactgtaataaaaaagccattgatttactgtccttatttgcttatgggcttttttttattattaatttttcactttttctttctctgttttggatcatttcttgtagacaaatgctgtgcttcatgaagttaaaagagaggggctccccgtggaacaaaggaatgaaatcttgactgccatccttgcctcgctcactgcacgccagaacctgaggagagaatggcatgccaggttagttctgttgtgaaatgggatttgttgttcttgacaaacaagaactatatttggccaagcccttccttatggctggcctcatccctttcctttgagggcccatgaaaaataagcacgtttaagatgctttcagctaaagttagctttcctgcccacggcacctacattaattgtaatgatccattgacgtcatcagtatatttacacaatttgttcccaaatataacatttagcataagtgtttgcattttgagcataatgtaatataagtacctgatgctgaagaaccctttttaatcaacagtgtaaaagactagcattgctatttcattagagcagatgtctgagaaatccatatagtgctcctatatcactctatgcagggcagattacttgaaagtatagtcatgcatcccttaatgatggggataggttctgagaaatgtgttcttaggtgattttgccattgtgtgaaccccgcaaaccttgatgacatagcctactatacacctaggctatatggtgtcgtctgttgctcgggggctgcaaacctgtacagcatgttgctgtactgaatattataggcagttgtaacacaacaataagtattagtgtatctaagcatagctaagtatagaaaaggtactataaaaatatggtgttataatcttatgggacgggaccactgacatatataaggttcgccgttgaccaaaacctcaaaatgttgttacgtggcgatgactgtagcctatttatcaacccgatttttagggttgaccaactaggaatgactcttgtttcaacctggtctctttccatagagttgcctgtgcttagaaacggtgttactggtgaaaactttctttaaatcatcagtttttacagaactgatgcttgcatagtaaatatcatgtggtcctattctgttttgaaaaacagttgatatgtgggaggctagaactagttctcgcaaatgttaggattatcttttagatctgtagtttgtaaaaattattgaattgtcatccgtctctaagccagagggagaggaatcaggaagcgtatggcatattttgtctcagagtcttatttggtgcttaaaaattctatgtgcctggaagtcaagaacatttattgatagacataatattctccaaatgacttcatgcaacagaatttataataattgatagctttactagtaataattatcataaaaataagtttgtctgaacaaggctgaagatgagcattttccaagaaaggagacagtatgagtatttattctcattggatatcagaaagctgctttttcaaatatgtattatctttaaattcagacttgtatttaaacagtaatttaaaaattcccaatgatattcaccctccccttcccccatctttttggtggtgtggtcggagtaaatggcagacagtttcttttttttctttttagaaaaaaatgtttataaaaatagacacaggatcttgtcatgttgcccaggctggtcttaaactccttgcctcaagcgatcctcttgccttgacctcccaaagtgctgagattacaggcgcgagccaccatgcctgcccagtggcagacggtttcaactaaagtaatgactaaatgatttccaatttacctttcaataattaattttaaaattttctctgtattataagttaagcatgtatattcattaaagtatacatagtaaggaatggaatatcagtttgtggacatctaaggggtttctttgtctctgtttgatgtcttatgtcgccctcacgatgattccaattaaatagaaagggaggaagaaagaatttccctgtaatatctcctctgcttcccttccgtccaaagaccgtgtggcccagtgagagcataaatggatgtcttttgttgagtgcatttggtttgttaacaataattttttaatacaccaaatcattagacaacatggtcaaagtggcctgtttaaaaggaatctgctttcagcatttctggcccttactgctaacaatttaatcaggagctggagccagtgttgaagttgatgtagtctagcaactgaaacaaaaattctcaagtcctttgtgttaagggaggaggaaagaaagagcttaacagctgacactgtgcagacccccttaaaactaaacacctgaaagaaaatttcaagaggctggtgtcttgagatctcagaaggaaaagtgtcctcagagtattaaataaccataatccttctccccaccacttctccacctccatttgatgtttcccatcttagtgacctatctacagactcatccatgcgatccgtataaacagacggttaccatacacctttcttttcctcatcaaagtgtcatctggctgtctggaattgggcattgcctcgagtagccgtcaaatgggtggtggtgaaagttataaaacatccactgcagtgcttactaagcagcctgtgttttagagattggcctattgtgtacttcggaattacacaaggaaaaatgtgctttgacagaaaataattagcactcaccaaaggccaagcaataggttacagtattttactttcatcaaagctatcaggggatcagttagattagataatagaaatttttttcctctgaaagttaaatacacatgactctaattaccttatattgcacattagagagtgcattatgaattgtacaacttcaagaaatttaggtcaacggagccgccgcagctggcagtaactttagtataagtcttttgtaataaaggtttttacctctctttagcaggttcatttgcgatcatattagggagaatttttaaagtaaaacttgtaacctggttgtaaaatatttgtctgtctctcaggtcaggcgccaagccattgtttgggactcactgaagtctcttaaactgaagcatatgttccttgtaatttagctttttgaggaaagtgtcaattttgcatgacttggggtaaccgagtttgtcacagtgtcacacaacccagcgactctagaggcacatctgagtgctgtgggtttccttctccaagcttcgtaatcccataaacaaccctctccaaataggcttattagggctgtctattcacttccccagagttgaatgatccaaaggacatcgggagaagctgtgtgaatgcagggtaagtgttaacagaagtgggacagaatttctgaagattcgcctttgtttatccagtcccctctgcctgatggacagcttgttatagcttttaaagaactgggcgagccctctgatctgaccccttcttgacctgcgtagcccaaaggtcagtctgcagctaataaactctgaggttcttagggtctactgtaggaaaaggcagaaaaagagcagctgcaaggaccgggtgtcccaggataggctactttagggtcactctctgataatgaaaatgattaccaaattatatggaagtttaactgcaatcgtgagtgagaggagggtggggcccggcgtattaggtttgataaatgaactgtgaagaggcccatctggctctcaacatcttttctccccctctttccctaccaaggggaaacattttaaaataacagcagtacatatagactcaatgacccatgcaaggagctggaatggattaagatttaatggtgacagtggaagaaattatcatttgaaaagtgctccaaagaaaaggtacagttcaatgtccacacccgagttgtctttctaaataaaatataataaaaatcagcgccttgtttattttctacaaagccctggcgtctttcctagatggctgaaaattttgagggtgttgtttattatgggataattattcatagtttagcttcaggaacggaatgggcttcctttgccttgaagaagtcagaatgagaatcaaagattttgttctgcctgcctgcttcatttcagtgatgtaggtaaatcaagtgttagagaaaatgcttttccaaaaaaagtgtgtccatgtcagcatctgaccactgattattgtgcactctttagtactaaatatatgtgtgactcttgaacagagtcttattcctactacaacctggcagtttttctgtaaatataagaagaaagcacataatgttaactgagtagttacgtttggttctttctttgttccttttttcaaagaaacatcatggtgatgctaattattgccaacaatggatggggtcactatacgctattcgtctatttatttatcgctaattgataagattagtctatttaaagctctcccccagtttctcatgaacatagagtcttgatttcagaccagtgatgatggaggccatgtagctctgttcttttgcagagatgagtggcacatgccatgagtccactttctgaagggagaatgatttcattcagtgagcatctttttgtgtattttgtatacctactgcatgagatgctgtgcataatagggagtgagctaagtggccaatttcagggtttatctggggatgagaatgtagaaagttcctagaaagaggctgtggaaggcagtggcagggaaagcagtggaaccatcgttaccacaacagagcggcaagttctctgacccactcaggaaagtatttaatggtagatgtcttggaagactagaattgttgtgttactgaaaaccctttggctgggcatggtggctcacgcctgtaatcccagcactttgggaggcctagacgggcggatcatgaggtcaggagatgctgaccatcctggctaacacggtgaaaccctgtctctactaaaaatacaaaaaaaaaaaaaaattagccgggcttggtggcgggtgcctgtagtcccagctactcggaaggctgaggcaggagaatggcatgaacccgggaggcggagcttgcagtgagccgagatgacgccactgcactccagcctgggagcgagactctgtctcaaaataaaaaaagaaaaccctttatattgaactatactgactcgtaatacaggcctcacccagacaataattatgttaaaaaatcaaaacagaaggcttctaaacattatccaaagttagcatatttttcatcaaggttttggcttgactatctatgtctgggggcatttcgagtgagcagaaagccaggtagaggataattcagggagatggcaaatactttgagaatcaattgtgctttttaactttaaagccatggccctaaatttttgctaagtgaggtgtaaatacaaaaagcaaaccaaaaaaagagatgaaagcaaggtcattagggtttttaaaaaattgaggtacaagtcatatataacgtaaaattgcatataacaaaatttatcgttttaaagtgtacagttaagtgattttttagtatatgcacgagattgtgcaactgttaccactatccaattccagagcatcttccttccccagaaatgaaacccggcatctgttaacagccaccctccattcccccttctccccacagtcctgagcaaccaccagtctactttttatctctacagatttgcctatttataacatttcttataaatgaaatcatacaatacgtgaccttttatgtctggcttctttcatttggcatactgattgtaggatgcatccatgttatagcatataagtacttcattcttttttactgctgaataatattccactatatcgatgtgccacattttatttatccagtaatcaactgatgggcagttgggttgttggacagtaataaattgatggacatttgggtgggttgactttctggctatcatgaataatgctgctgtaaacattcatgtacaagtttttgagtgacatattttcagttctcttgggtatatacctaggaatggaattgctgggtcatatggtaattctgtgtctaactttttgaagaactgtcaggctgtttttcatgtctgttacaccatcttatgttcccaccaagaacgcacaaagtttcccatttttctatgtccttgtcgttacctgttattttcatttttttggactgtagatatcctagtggtatattattgtggttttgaattgcatttccctattgactaatggtgtcgagcatcttttcctgtgctttttgaaaactattgctttttcaatcggacattttaaaacatggcggacttaaggacttacccctcttgttggtgataaagagctcagaagcctgttaagaatatttggcttgtagaagaggtgaggttccaaatggggctgtcattaaattgcagcagtgcacgtttccccgttaccatggtcaggcctggctctttatttatttgcatgtggccccacttatttttttctagagattacctacttatttctcctaccattctcttacatttcattcaacattgcacactggataggaatgtagcctgattaaatggaaactcggtacctttatagctctttagcttttaggctcaaacaggagttactgtactcccataggagacaacttcatttgggtcgaaggagccttaaaaatggtgctgagattcatttcaactaatgtttatggaagtttcttcgaaaagcttttagaactacttgcttctacttaaaagtgactctcttaagatccagataactttatgtaaaaatatcttcctcatattggtctaagttcccatttttttctggactggtaaaacaacggtcttattattagtcatctttctattctctgtgaccccagccatcccatcaccacctacccccagaatggatccactctggacatctttgttaaggctgtaaaatctggttgttggaacctagaatgtgtaatgaataggatttactattccaagttaatcagctttagaactttgatcggggctcaacaagtataacactttgtataagttacttatatggatcaactagcacactgaggtgttctccaccggtatctgtctccccttctgcctcctagctagtcacggattatatgcaaaaccgacaagtcggcaccgtccagtttagcaattaactattatttattgagtgtttgttaggtgcaagtaactgtgctagacactgtggggaatatcaagatgagtatgacgtgagtctcaactgtggaataatttactttaatgtggaggtggtagttaataagaatacaatggctagcacacaccctttaactcttttttctatgaggcactgtgaaaccataaggtaatttagcaatggggtctgccctaagggaacttatattttgatagaagcttaaaaaatgaagtaacctgacattaattatatatggacttgattctgtgtttacatttttatctctcctaccagaatgaaagttttatgaggattggacgtttgtttgtttaccagccgtaaaacatacacctcaggccaggtgcagtggctcaggcctgtaatcccaactctttgggaggctgaggcgggcagattgcttgagctcaggagttcgagaacagccagggcaacatggtaaaaccccatctctgcaaaaagtgcaaacaactagccaggcacggtggcgcacacctgtagtcccagctacttgggaggctgaggtagggggaagcacttgagcccaggaggcagaggttgcagtgagccgattgcatcactacactccagcctgggtgacagagcaagaccctgtttcaaaacaaaagaacaaatttgcaccccagatctttgtaacattaagctatctcttccatttgaataatgccctctatcaaaggacctcattgcctgtttaccacatatccctggcatctagaagaatgcctgacactcagatttgtgaaatacctttcctctcaatctattccagtgtttataagtactttgtctgctttattaattttgaagaggaatgaccacttgtgatattggcctgttgctttttttgctctttttctcaaccttgcctggtgtggaaatcttgaaattcgaagtcaggatggatctctgatattggaagtaagcactggttattcatctaaccttgccaggggtggaagccttgaaactggaagtaaggagaaatctctactatgcagttctctggtgtttaagccccaacatggtaccacaggcccttattccagcatgagcaaagagggatgccatgtgcacaggctgactccagtgtacttgaggaagagaacaccatgggactgggctaagaccaggacaaaaagacatggtctcctccctgagccaccattcctaatttgttgactttcctagaagtgaaatggagctgggtgagaagaggaagaactggcatggcgaggaagaagagagttataaagacagccctgggacatgcctctgaataaagggatgggttttagttcagtagggataggaacaaagctgaggctaatatggcttccagtctgtaggcagctgttttttcctggtcacctgctaatgtcctcgtctgctttagtgatatcagcacagttatgaactttagcgttggtgattcggcatgtggactagaacttggagctgtgttcacaaaaagtggagctcctcaccttgaggatgggctgtgggataatgagactgatgcagttatctgctgagacaacctgtgattgtgtcatcggaccacgtcagctgctatcattcatgctaaagagactggctgcttactccggcacagctggttagttggaaactagaagttgtggcatctgtagttcggtagctgtcagttgctactaggtaaacttgtttgcagtgttggggtgggcatgaggaataaatggaagagattccagggagaagcagggaggcactggcctgctagttgccatccgggtcttttttaagacatctgtcccttcgcttttaataattacagtctctgctttttgctgcccttagcagaagaaagttctttgtgtttctgatccagattactccataaaacctgataactccataaaacctcctcaaaaatgtgtaggaattgaaacattgtataaatttagagcaaagattaaatgagtctagagatagggttacttttttcccccaagatacagcaacttatcttaaggaggcaagtgttgttaatgttattaccattgttactgtcattatttgaacagttttatgggggacaaaagccaattgacttctgtgcatcttatttataaaatcaacacatgggctttagcatgaactctgtttctggcaggtttctgactgtgatcagttgctggctggctgtttcttaggggcagtgcttcttaaactttttgagaaaacattgattcatttatttatccaacatacatttattaagtgtctattgttttctaagcactgttccaggttcacagcagtgaacagaactgatgacagttctttcatggagcttatattctagtggaatgacagatatgaactcttttcctaagcggaactctgaaaatttcttttataaaatgtgcatatagttgctatgccctgtatattcaccagcactcaacagtgaccaaaataaagtcattcagttgagataaagatacacagttctcttttctgagctttgttataaagtaatcacttgttataaaatttacatttcaagttgcagtgggtcatatttgggaagtagccgtgggatgccagttttctgaggaacaccatcctagggaatccgtaacataaattctccttcaattatccgtaccgtggttcccatttacttttccaagacctgcgtcactttaaaggtcttcatttgaaggaaggcttaaattcaggccacattatattgacaaatctctctgaagagagaatgggcaaagccatacctatctcataggtgttgggggattacctgtgataatgcactcaagtacttcataaatgctgggttttgttgttgggagtgatctgtcagtcatgcgttggttctgcaaatatttcttaagtgcctacctggtatgaggagctatcttaggtcctgaggttgtagagatgagtaacatttgattaggggaaatgtattacacaatgtagaatcataaatactatggaagagattgagtcatgattccatagaaacccacatcccagggaagaagacaggctctccttaagtgttctcataagactctcattatgtgcccagcgacagtgagaaatactgctccattccccaattgtgttggctaccagtagataggtagctatttgtctcaaagcatgagtgagaaataggagagaaatttatacgtgaggataggtcattgtataaaagttgtgctaccttctttccattgtataaagtttgtggaggaaaaatggttttctttcagagtaaatttaattaatatgtttgggggcatagattctgaatcagattgcctgggtttgaatcttggatccacttctataactccaggcaagttacaattgtggattgtaactagatgagttacttaacccctctgagcctcaattttctcgtttgttatttgcctaggggatgataataatagaacccatttcatagggttgattaagtgattaaatgtaaaacacccagagcaagtacctgtaacgtattaggtgttcaataaaaatgacctatcatgatcttcagatcaaaacaataaagccaggaataaacccagccacccttatccaaattggcctctcctttgagagaatgcctcatgaagtaaatatcctagcctcctggtaggggcctgatattgcaaaattggtgcagggaagaacactagacagagttggtgctctgtgctcagcagtgtcacacagaattgacaggtggagggctggactccagtttgaatcccatcattagtgactataggactctgggcatgtcacagacactctacgccttagcaactttatgtaagaaagaagcgacttgatctcgatcgccccaaaagtgggaggcatcttccagctctcacaaggagtggctccatacgtgagatccccgggagcagggaaaagtggatgttactcctgatgggtttcactcctctacttccactttccctgaagtctgcaattgtactaattttaacaacaatagcagctgacatttattgagaagtcactgtgttccagacagagttttaaatgttttatatgatgagaaaaccgaggcacagaggtgcagagtaacttgcccaaggcaacagctagtaagtagtgaagatggaatttaagccaagacggcccaggttggccaagagcaataacaaagctttagtttttaatcaaccactgatacgattcacttagtattttagagaccttctaggatccttctcagtgtggagataggcaggtatgtatctttacatatttatttcctctggtacctaacatgttttacactttttagttgtgggtgcatctctataaggaaatagtatccagctaatgcattatcaatctccctgccatggatcttttaaaggaaagttatcacctttatatgctctgtcatttcttttatattggttacagtcttttagaaggtgggagagtaggggtgaaaattagaacaccaaagtttagcctccaagaatctgtaaatctctgtaaatcctctaagtcaagtaattttggggctgcgttagtcaaggctgatttcagtgggtgcccttaaggtgaaagggtagcaatttatctactccataatgggttaatcaccagctgtacagtttgtttatatctaggaaacaatttaccacacatgaagagtagtaattttattctatctcaggggtatccccagtgtattttacaaatttactctgtaatgttatagataaaagtttaactctggctttcagttgaggaagtcatggtggaggaggatgggggaaggggaaggaacagctctactggcctgtaggggacactgttgcatcatttattagaattttccagtctattgtcccaggacaaaaaaaacaaaaccaaacaaatcagaaaacaaaaaaaaatagttgaatcaccttgaaaatgcttattagaattatttgaatcgttccaatgtgtttagaatgttcaggacttctcaggtattggtcagactgttcagtatccatgcgtgaaagaaataggttagtggttctttctgagacaggagtgtttgatgggactcttctgattacctttctctccatagtcaactttggatagggtgctcaggacgttactttttagtttaataaacctttaggtttagttaaccatcttcattttttattaagatatgctcatattaagttgttttgcttccagaatgtatgctaaataaatgtcccaatccttggaagggcgttttggaagttcctattgtcttctttttattcttatattttttttcactgaaaaagttgctgtttactgaaaaaatgaagtcatatctacaaggaaggcttatgtagggcctggtctgaactccaggaagcatatgaccagatgctgtgctacggctctctttccagactgttgacagccattgtatctgtccaggtaccccatggcctggccagcaaaacctccacccctctgcccagctctggcctctttcctaccagaatacgggcctgggaggcaactgcaatgaaccctcggaaagcataggttttgctaaggcagcctgcacagtaatgatattgttagcttgcttcatttccagtttcaccatcaattacgccatgtgtttcatccagttggtgctaccctcccagtgttaattataacctacaagactgttacagttaattttatggcaagcatattgtctcttcaaggctccagagcagctcataaattatcttgaaggtaaaatgtaacttggggaactagttatgaaaattccatccatctcgcttaggagctgcagctgctactgtcagctgccttgctgctgcactgtgaaggaattatggtgggtcaagtttaagagggtaggcccaggctgtcactgaggagaaaggctgtcctggccctgtcagacaagtaccttctgccaatccctggtggtttcactttgcaggcaggaagaggcaggcagcgcaggtggatggtccccaagctgtctgtattcattactttacagaaacttgttgtaggtaggcaggtccagagacctttcctcttctctgttgtcatgatgttaggcatcatctgcaaagtgtgagatagataactctataactaactctgggcttggttcaggagaggaggagaataagggggcggaagctattagtggcagcacttcccagccaccccttactggtctcctacttggtaatttctatcttgcaaaagcccctggcttgaacgagcattttatttgtggtggtgatttttcatataatctgataaagcgagatttcactgtggacgaatgtactcgaaaattgcctactaaataaattaacaggttatcttattgggataataaacacactccttttctatttcctcacacgaagtctaagctttacatttcagccctcggggctttagcattattatttttaatgactgaacacaagtctttcatttagcttgtttgtatagttactgtaaatgatctttctgctgttggtacttcatttgaaattctgcatgttatgctagctttaaaagctttgagggggccttggagaattgggaagctgtattaagcacagcatcttctagtggcattggaaacgggctatggcagaaaagtcagagagggtgtgttaagaaagtacgcctgcatgtataaatcaaagtctgagtttgagtgacgcgtacacaaacagtggtggtttcggtggcaggttgagaactcgccattgtaaagtaagagagccattcccttagctggtgatttctccttgtgtgtttctgagcacttttattgcattcacacatctactagtttttgtacgaagagtgcctcagatcattacactgcggctgtataagagacctggtttggagggatttgaaggacacatggaatagtgaattcatgtccaaagaggcaccgggctttctgaaggaagtattcgtctgagcttttgatgatgggggcatgagagttggatatttgtgagttttctagtgaatgctagtgaactcagaccagggattgcagattcagatgtctgtaggccatggtaatcatgtatgtagataaagccagagaggtgagacactgttaagttcaaggcaaaacacacgtgtgtgtgtatgccagaatctgcatagagtagaacaatgttacaaggtcacagaggcaatacccagattgtcttctggtctcctggccagcggacattcacactttgtctcaagtgggcagccaggcagctgctatccagccttgcgaggaggcaggatctatgttagtaggtcttccacattttcaacagaagtggaacattcatattgtatgtgtatgcttccgaagtctcacagtgatttaaatgttagcatgaattcaaatatttgtaactgttaggctaatcaaaacatgtgtggagcctggacattgtgggcaggattctgctatagaatgaaagtcctgactgctttgaattaaaaaccttctccatcttctcacacttctcaagaatagaaggaatgaccctggctgggagaccagtacacaatctgtgtattgcctctgtgaccttgtgaccttgtaacattgcattattccatgtaggttcttgcgcgtgagtgtgtatgtgtgtacgtgtgtgttgccttgaacttggcactatttcatctttccttttataaacaaagtatatgagagtttccaaaagtgaatgaggtgtatatggtgctcattgtcaccataaaaaggtgtccacaaaaatgttggcagttttgaatttgataaagggtttaattctcagaaaggaaggactgggacttattgctagtgaatcaccatttctcctgttacacccttgagctcctgctttagctcccatctcctccatgggggaacccagctgttctttcactgtagaagtgaagcttgaacaaagatgtcatgtggccagaatcatcttttagtctcaccactccacactgatggtcacatagaggtgtgagttgggaagttgttaaatacaagagggtttgagcttctggagaagaggaaaatgtaaaaatattttttcctttaagaaagataaaaaggtaagcctaaaccttggcggccaccgaagtcagctgttacgcatgtgtagttaaatttcactgtaaatatttcataagggttcttagaatggagccaggttgacatcacagccccaactgtaccaaaggaaccatttcattaaaataagccaacatttccaaagaaacacgaatgtctatggcagagttaacataaggtcagaaaatcctctggaagaaatttcggtatcaatgtttataatctctgcatttatggatttgcagtttgtgcaaaaaaaaaaaaaaaaacccagtgagactttattttggttaaataagactagcttgtgaaatagtctgtatatccagatccatcctaacccaatgccttggcagccttttggataaataatgtcttttccaaaatgtgtgtatttgaaaaaggaagaggaaaattaagtggcaaactgtgtctctgggttgccataaacgaacagaatccagaaacagaaagcaaagactgacagttcattcgttctttaaacaaattacatagctgtacgtttatttactgatgcatgaagggttgcagtgaagagcaaaatgtttaccctaactactttcattttctttttttggggggggaaagtaaaggtttatttaaacatttttttttttttggtgtgtaacacaaaatctatatgaggtttagaggcatttggcaggaaaaaaaaagatattcacatttgtaaaaaaaaaaaaaaaaaaaaaaaacttaatccatgctcacagatggtcctgttcaggtgctattttaattatgaggtaaaaaaacagccccacacagtaggaagtcgtcttaataaatggactggagcttttgtcttcaagcgtcaaaaagcctcgttactgagaaatttaaatactttgtattataggggagagtctcaaaatgaccaggatacttggagaaagcaaaatgatggattcttctaaagatcaaatgagtatacgagaaatgttttacaattgtatagctttgagcttccttagtattggtcattttagtgatattttttccagtgataaatgtcgtagatatattcatgcagccagaggaaaaataaacagaacaaattacaaatacatttaaaaaattttaatccacgtggaagtatttctttcctgttcttaagcgcaaagggctgctttgcccttcatgtgagagagtgcccagaagaactaatagtaattcaaatgatgcggtaacttacagcttgcattaataacacacaaatagaacagtcttcttactaaatattagtaatataataatgttttactgtctttcccatagtggggaattatgaggacctcatgttaggacctcagtgtcctgacatagttaattatccgtggataatggcttcagccaccagagttctcagtgaggcagctttgttgttgagggcttattaagtgtttgcagactcaggtgcggtgcacctaggctctttcctacagaagcaaacagctgtgttggctttaccgtattatacatcacataaagcatctcatttattataacgaagctaatgatgctagtggaaacctttatgtcccgttctatatagtgataatatatttgctgtaaagttgttagcttgtttttcgtaagtaattaatcttttcttataccaaatgtatcacatgaaaatgggttagcacagggtcaaaatacatttaaaccagtctgcagagattggataagacctttgaatagagcatcactttttttctttcacaaggacctcaccccgtctccaagctaccccccaacacaatgctcacattactaggaacttaggctaataacagggaactgctttcagttttttagtgctgagataggattcagacctgaatgtgtactaagccaagtaagcttagtgacagtcatccatgttcagtcccttaacaaggctgtgtattgtccatgtggataattttggtggtgggtttctgtctaatctacagtgactttgagtttgtgcctagggagactctagtgaaatgtgccaaggcctagttcagagagtcctgaagtagtgcgctgtgcgtggcacacaagatgattctgtgagacactgatgaatactttttatttgaaaatttatatgctttgctttttgtgtatatagggagacatttgaaattcactctcagcaattttgaaatcatgcactctattattattaactgtgttacactgctatgcaatatatctcaaaaactgattcctcctgtctaactgaatatattttacgttaggttagaaaagcataattagaatattggatccatggttttcaactaatattattgaggacaagactcaaatcaatcttgtttttttttttaagttgatttaaagaaaaatgctagaaatgcaataatgtgggtggttcatggatatggctaaaatcatgatagtggatcacatcatcaaagtttataaaatgctggccttataaactggaggggtgcagaaacatatgtttcaatcataattatgctattgattatgaagaagatgctgatcatcatcatcatcataataatagcagctaacctccactgagtctttactgtatgccaggtactattctacgtgttttgcccatattccttacttactcctcacaccaacccagtgaagtagttttgttttgttttctttcattttatagttaaggtgactaagacccagagaggttagggaatttactcaggatagcacaggttgtcagtggtcaagccaggatttgagcccaggcagtcagcttctggtgtcttcttcttaatctacttccttttgtgatagattaagaaatattattctctctctgttctctaaagaagaaaggtggagaagcaacatggaaacatgcaacatagcatatgataatgccatgattatccatgttttctgaagggctctaacctgtgcagctgactggaccctgctgagcctttggcttccttatgtagcatcctggatgtgtactagagcagatgacaagggtcagtggagcaaaaaaaatctttggcaacttcccatattttcgtacttagaaaagtatcataattcttttccccagtcactttaaatatatgcaagcagtatctaatcttgtgggaaactgaaagtgaaactctctagcaaagagcatggttatattccaaggcagaagagacagagttaacctatgaaaattaaccttgactgtcaacaaatgtgctgaaatgggtggaagaatacagcccacaagactgagatgtgggtgggaattggatctgccaggtcccagagctagacctaatgcacatgtttgaagttcttctgtgactctcgattaaccttgatttaaagttccagaaaaatgctcaagcaggtgagaattctcatactgtctttctcatttgatatttttctgagccaaagtgcctactttttttgagcggtatttatgactagttacattgcacaaggaaacttgacttgggtgaggtgttaaggtatggagaaatggataattgggaaacttagaaaacccgtccaatgaacgtttccaagtcaccctccccacgggcctagagtcatcatgaacaattacttgagaattgtgaagggctcaaagaggaaaactgcagaacaaaatgggttgaaagaatgtatacttttgtcatttcgacttgaagccaggggctaaaactcatgtcttacaccattgtagtctacaaccatttaatttgctaacaagacttaactgatcaggatctgcaacctccttctccagtataatcaaaacaagaagcatttggctctggaaagtaaacgttgtctatcttttattgtctggccccaccattttctttctggcaggctgagatgaaacagaaagctgatatttggagccactggaattgtaggccttgtaatttagaaatatccattttatcccgtgtaatttcttccctaagattcctcagtctaaatctgatacaggtaggagccaagacaaacagtaaccatttatagtcacccagaccagtttgaatttcactctaatgtaaagcaaaaagagtttttggcttcatttcaggtgtgtaacaggggtagaaaatgcatttaaaatttagcagcaaatgttaccatatgtttccataacaactgcaaacttttatgttagaaaagcaataatataaacacgtaggaatcttggaacagcaaactattaatttaccaaatataaaaaaatccagcatgaaggggcttttatagccacagaagccatgaggggcccagcatcctgtgaatttctccattatgtggcagaaaatgctgctggttcatttaaatgagcaaatcttttaaaattataggtacagtgtccattctccacagtgcatttttgtgaaacaatgtgtggtgatgccagctatggctgaattcttcttaccatattgaactagtaaaatacgcttcggaagctactcccaatgtatatctgtaaaacaacagcattttctaccttcacttatagcttcaaacttaatgacgaaggctagggtcctgcagaaagtgtagtgcccagtagttggccctaatgcttggcaaggagtagatgttcatagattgttgatagatatgaacaaggttctcagttttctcacctacccattttgaaatataaaaagacaaggggaaaaggggaaaggtggatctatttaagcacatctcgagaatgaggagttagtaagagttgttgaaatcaaattctctgttctctgatttccctgtggaacaaagaaataatcttcttttaacatggctacctgtggatgggcctttcatttaaaaggaggcagaactttttttttccctagacctacctcagagggtacatagggttttgaatctttactacaataaaaccaacaatgttaccttgtcatttaaggcagatggcgtaccttgactattcctgaaacttgggttcatgatgtcactatcattaaacatataccaatcaatgaagggtaagtaaagtcaaagagaaaagaaggtcaaagggaagtggctgacataaaacttaggtgcagaactctgggtgcacaggggatgcattcaggaagggtgctggtgtggctgcagggtagagagaagggtgaaatcttcagaactttagaaggcagagtaaagagacgacggtttcagctgtggcagggttttcaccttggcccctctttagctttcacagtagagcccatgggctgttgagccggaagtggtgcagcaggggcattggttaggaaggctcacgtcgttagtgggccaaaggagatggacgctaatgtttaaggagcctgaatggatctgagaaaacgtggccaagcagaagcaagagtgagtggcatgatttagagtagcagagatgggactggcaaaagaagagctgctttgtgaagacctgattcattcccaactctttggtggacctctatttttagagcagaaacctaatttcacccaagttaccaccgtctctaattagaccagtaagaaagtttctcctgtttctgtcagtgcttgaccacttctggagtgttttatcccataaagcattctttaagcattagtgccattggagtctagcattgaccatatgggtccttaatttgtatctgagtatccagttgcatgaagatggatggttaagaaaaaaaccaagagctattcatttattccacaaatatttactgaacacctaacagtgtccctggaactgggtatacaagagtgaacaaaaaaaccacagcctgtttcttgtgctggtagagcttacagtctagtggcaggaggctgactaaaaataagcaagcaagtaaaaaagaggatgtcagataatgacatgcactatggagaaaggcaacaggtaggcaattggggaggggaatggaactttttagggaagcctcatttaagctgagatgagggggaagagaaggaaccagtcaatatgacagagggagaagtaagtgagatgggatgagagaggaaggaggggtcacattttagggttggagtaaagacttcatcatggagtttgctgacagatgaaacataaatccaaattctatttacaaagtatacggaaagtttccactgtgtggccagtgctgtgttaggtgctgtggaaaacacagttcctctaatcaaggttatagtttagttgttgggaaagagacataattgattgtgagataaatgccaagttaaataacattgaccataagtacatcatgagctctttgaaataagtagtcagtgtgaattggggaagtctttatggagagaaagagggcatcaaaattggagctcaaaactattgaggctgggcgtgatggctcatgattgtaatcccagggctttggaaggccaaggtgggaggattgcttgaagccaggagttcaagaccggtctgggcaacatagccagatcccatctctacaaaaaaatttttaaataaaaattgaaaaaaaaatctattttgcacctcctatgtgttgatggtttgtgtgtatctttaatttttttccttgtagtaatcatacaaaggtgagtggtttcatccccatgttatagatgatgaaactgaattcagagaaagttaaagataactattgacaaaacttcagctcaaaccatttaacatctgagaacctaaaaatcactgaccactaactaaaaatatgacgggctttgagcatccctgtgatatttctctccctgtctctttctctgttttgccgttgatatgctaaatgtcagaaccaagaggatctgtgtgcttgtttttagggctgtggggaggaaagagtgctctggggagtggatggtctattatgaagcctgtctttgggagaaaattctccaaatcgagcaggtagtggcagctactaagtgatgaagaaagcagatctagtcactggaggagaagaggaaaattagtggaagaagtaggtacttcttccttaccttgtaaggttcaggagaccatcaggatgaaaagatcatgaagactattgcaattagaacacatctcaccggtgtatttcccacagacaagcagaaatgctataaaaggaggcataatacagtcatgaaacatctaaattttccttttttttttttcttcttttttattttttagatggagtttcattctcgttgcccaggctggagtgcaatggcacaatcttggctcactgcaacctccacctcccgggttcaagtgattctcctgcctcagcctcccaggtagctgggattacaggcgtgtgccaccacgccaggctaatttttttttatttttagtagagacggggtttctccatgttggtcaggctggtctcgaactcccgacgtcaggtgatccacccacctcggcctcccaaagtgccgggattacaggcatgaaccaccgcacctggtcccactttggttttagaactaaggcaaccctatttaaaatgtatttctataatatgtagatgtttgcttcagggatcctttccttagattatctttttaagggttggcctgggcatagataggtcaactttaagatgatcttttttcaattgagggcatatcccaataaaattttcttatcccctggcttgcccggggctggcatttctgacagacgtgtaaacagatgcaagcattgttgctaatgacaggtgattataagaggcatggaggccaaggtaattaaaccacgatttgacagggacatttggcaatgtgatatttcagcattagaactctctttgcaacgcacttcctccacttggcttggtgaatataattcatttttattcttcagagtgtgttgctttgagatctgaaactgtcctctctgaatttcttcatggttcattgtagaacgctagaaaatgattaccattggacgttgtgggaatctagtcagtatctaagaccctatccaaggttcgtccagtagtagtggaatagggtctgtgaccctactgctggcattgtatttgaatattattatgccctatgtgatagtgatagtgcctttggagagaaacatgagttattttcataccactctaatttcagtttctctgttacctggatttacttgacgttgttctcatgaatcaaaagatagcttattcaaatctcttcttccctaaatttccactactggcagtaggagaaatctcaaattatcagtaacctggtattaggaggaatgatagtagaaatgatcatcaagacatggaatttatttattcattggagttgaatgtaatttttttaaagtaccttctttttgctatcagtaacaatgcctctttaggcatttagagaccacctcctgctaaccgctaatgtggcaaacttatgaatatatatttgggggaatcctatcttctattgtttaaatagcagaccctcatggactgaatatttatagttttgatattgactagctacatgaattatattatttatagtgaacatagtagtgtggtttcatctaataaaataacaggtcacatttactatttgttatggtcctggcacttgtctaaaatagcaacttttcccaagtaggtcaatccattccttgactgcaaaatcagctttttaatactcttggtatagggcatgcgtggccattttaagagatcagtgaatcggcccacttagagaaggttaaccactagctagatagctgttacttttcctcgaccaattttgattttccccagaaagggatgtagagggaaatgaacttgtgagtatagtttcttatggcagaggagtgctgagtgattgtgcctcttcctgggttgcctcctccagcgtggaaagcttgggaacacttcggcgggcagcctgggaagctggcggccggcttttacattctgcttcaggctgcagtctgtttctaagcagaggcttttttaaagctttgtcagataggttaaaaggtgtcccacccccggtgtataaaaaagagagagcgagattaagcttactaagcctgccatgttccctgtaaaatatcaagtcaaaatgattttgaaatccaaagttaccaggcttagggggtgtgaccttgagtggaagcagcctgggaactgggaaggagagatctgtgcaaaagacaattggccacaggctggtggcctcgggaaagctgccgaagccaaagtgaattgtctcatttctctgccttgcagccaacagagcacaaccccaaataaatactcagcctgacatctaggccggtggattcaccatggagctccaggcagccaacctttctcagagtgcctgcttaaagcaaagcctgggttcagctccagcagctgatgggggtgaataagacagggtctctgccctcaggaagcttaaactcagaagaataccactaaaaattaaaatcctcattgaacccctacaaaagcatccaaatcctttgcatgtattatgaatgtgtttaatcctaaataataataatactaactagtacatattaagtgcctctctgtgccaagtactttttaagtgctttatgtgaattaactgttacaatggtaggtatgtttattatctctaattttaagaaaagggtacgtggagccaaaagatgtcaagtaaccttcccaggggcacaaggctgggaggcaggggagctgggattcccaagcaggaagtttggttccagagcccatgctctaggccagtggttctgtaattttagcattagaatcacctgtgggcttgtgaaacacagattgcaggcccttcctgaatgggcttgaatagttgcagtcctaacaaattctcaggtgatgtggatgcccacagctctatgccaagtgggaagagcacagtggaaaccagtcactataaaacaaggaaaagtggaacatcctgttactgatgtaagcagagtgctttgagaatgtcagtagtagctaataataatattatttattattattataattattattgtcattataactgtcatttattgagtgtttgtactggacacttttgtaaccatgtaaccattataactgttactgtgggtaatctcatttaatccacacaacaaccatatgaggtgttaactgtactgtacagctcaggaaactgaggcacagagagtttacaaacttgcctaaatgacaggccaaggattcaaactaccccagcctaattctggagcctaagcttttaaccatgaagaagatagtgaaaagaagggaatcaaacacccatccatagagcaggtagggtacaagctgggtcctgaaggaggaagatgcccaaaaaaggcttcccaaatggaatggatatgtgcaaaggcccaggggcatgaaggtgcaaagtgtgatagagagtgaataacatggagactcgtgtgtaaactgcatggcaagaagtgatgaaccgtaaggatgggaaagcaggttggttgaacagccttgaaaatgaggagtcaacagtattcaagactggacttggggatttttgaacctgtcagggacacactcagcctcaaaactcattttttgagacttccaaacagaatgacagtcatactttgttaaagatgcaatggggtcatctcttctctcctttacatagtttgagagtctcaaaatacgttcagagaagagctggatgtctaaggttactaaccctgtgacagtgaatcacaccctgccaggggaagggtattttgtacacagccacatcaaaaaaccagtgggatcatgtgtgcccagctgtgagtgtatccgtgtataaatccactcactacacttagaaaatgcctgccgtgcgtggcactggtgcaatggtatcgttggagctgccaacttgttttatttctgatagtgcttggcagcccctgaaggagggaaagtatgaatttttatctcccatttactagactttcattgtattgtgcttacagacacagtgtcagcacataaaatgttaaacatcactggtctgaaagaggctcccattgtcttacctctggtgctgggggaatcttgctagctttgctgtagtggttctgtcagtgtaatatgacatgaagcatttctcagtaatgacagacattgaatatgagtgacaggaaccctgaccacaaggaatgggttcaattaccagaaatgggggtggggggggcgcggttacctgagataaaaccaaagggcccaattgtgcttggttttgaccccttgactcccagatccagagcaaagacaaatggctgattaaccagcccctaaccctctttttcagtgataaacttgtttggatttctctgtccgaaaaaaaatctatgggtggcatggtttctaaaggaaatatgatcagaaacaggaggactggtgctcgtcatttttgtctcttgcaagcacaaaactgaaaactgtcattctatcttggactggatctaggacggtgtccagaaatcaatacaagataaatgattgctctcttcaccccacctttcttctgctgcagtgcctacattgctccagttcacctgtagccaacctgacgccagtgtaaatgagagatcctgccatcagaggctctccttttttttttttcccctctcctgcaggctgttctgctctgcatcgagtgcagctttgtgcttgtttatagtccactgcttacagcccccagatagagttatagcgagcagaccaattaaactgtcgcaggctgccctcacttgactagctctgcagagtcatttagccagcagacattcctgactattaaagctagtagcagcatgtctccagtgctggagataaaatgaatgaaatttgttattgtgggctgacacttgatcctagctgttgaactaatgctgttgcacctgaagtttttctttatggtaattgctgtctatgttattatttcatatactaaattggagaaaattgcaacaagtattaaattctttgagctaattcacgagagttctattgtgcattcttccaaggtagatcccaacttctgttgaagcctgggaagacagatgtagctagccagatgcactggcttgtgtttcatcattatcagagacatttcaatttcagatctggccaggcatttatcagctttacctgaaatctcttttaaaatacactttcgcttctaattcagtcagcatatgttgggatctaccctggggaattcagttatgatgaccaacattgacagtgatttgcgctagtctggctgattcagtgacagatacttggtggtatcagtaagtctctggcacagtatacgcttaggtaagtgggcagtgtgaaataagacttcccaccgggcacctttggaatccacagctctaactgggagtccttgaacacctcaggtagtaccacttcaatgagaacccatcagaacaggtacatgcaaggtacaccgcctcccaaagcatccgaatcactagtcctcactgccctgcccatctcctaatttctgttaactccttttaccagatctctttccagaattagggagattattttagacttttcaatataaaccatattcagagtttagtgaaatctctgaggcctctgtttctgtggtagattgcatagaagatcatttcttttacagcattcatttgtatgcttagcttgtggtcagagctcgtggtgaaggctccagacaggacccagaataagaattcaggcctggtttgtggtagaagtactatgcttgctttcatgttaatgctttgggaagacactgaccccaatcataacgttactttaatttctacctgaagaccacacctgacagacatagcagggctctgtcaattacagggacatacatctctagaaccccaagactttgtcacctccctactaggaaacagtaggctggttgtactccatattttgattagaggcaaatgtgagaggcctgaacgtcgaagtactagaagagagacatggggttttgttattatgtttcatcattctgcccccaaatttagggacagtccacagataatgatgcgtcctgcataagtgctttctctcttgacatagacaactgtaatttgaatgataatggctagcattagtgtctgtggtggaggatttagattgcaagttgaagtccatatagtttgtgaggtcccaaatatactgaatgtatgttggtctgcattatttctgatattcataacctttgtttaataaagaagctcttttaacaactcaaatctgctaaaattgaattactgtaatttgcagcaaagttcagcatgagaaatgtatattttctttccccactgagaaaatgaaagaagcattagtctttcgtttatatatgagatgggtagattatgtatagagtatcaagtttagaagatttattttcccacgctcaaatccaataggaaaaactggcattttcatcaaaactaaactaagactaatctttattctattttctgaaattgccaaatgtacaagttttaggtattttaaaacagtatagtcacaggcaaacattaacttgttcccagcggtccttcagatgcacattcattcttgtctttggtatttgaggatcctaatgataccataataacacaagtaaaagttgctgtataatagctgcatgtgtgcatttcagacccagaactaattctccatgtttctgtctctgtgtctctcaagcaggagtggtaagctcttctctccaaatcttacctggacttacttttctgtatatttgtgttattgttggggcctagattgacctcttttgtgtggacagcacagagaacatagggaagacctcagcatgcaagctgattgacatcatttggatctgtgtctctgaccaaatctcatgtcaaattgtaatccccagtgttggaggaggagcctggtgggaggtgtttggatcgtgggacagagttctcatgaatggtttagcaccgtccacccttggtactgtgtagtgagtgagcccttgtgagatctggttgttaaaaagtgtgtaccacctctgccccgacccttgctcctgatctggccacgtgacgtgcctgcttcccctttgccttccaccattgtaagtttcctgaggcctccccagaagctgagtggatgccagcatcatgcatcctgtacagcctgcagaaccatgagccaattaaacctcttttctttataaattatccagtctcactctgtctcccaggctggagtgcagtagcacgatcttagctcactgcagcctccgcctcccaggttcaagtgattctcctgcctcagcctcccaagtagctgggattacaggcacccgccacaatgcctggctaatttttatatttttagtagagacagggtttcaccatgttgaccaggctggtctgaagctcctgacctcaggtcatcctcctgccttggcctcccaaagtgctgggattacaggtgtgagccaccgcgcccggcctaccaatgtatttcttaaaatttaaactttaaaactgttttcctaagtgtggataatttagaatgggttgagctgatatggtccttcccatgtgaattataggcctttgttcaggtcagggatcagcaaactttttctttaaaaggccagatagtaaatatctcagattttgtgagccatacagtttctgtgacaactgttctcctctgttgttgtagttcaaaaacagccctggacaatatgtaaatgagtaagtgtggctgtgttccagtaaaactttatttactaaaagaggtggcaggatttgactgtcaggccatagtttaccaacccctagttgaggccaggaggaagggttatgtttaagggaaccagaacacaaccaatatgttgtattcttttttcatttgttgttcatgtaaattgctggtgagagagatgttctctcagcagaacttgaaaccattttcattggctggggtttaatatttttttaaatctcttgtttaagcacatactaaaagtgtccatgttctttccattaaatgtgttggttgccttcccagacttcaaattgcagtgaatttatccccaaaagatgtttggtatcaattctcaagatgcaatttgaatgtagtctgcttctataatggaaacagtattccaaatcttcattatttaagtttcatagaaaataatgaatcattgaattggttattactcaacattgttaaggcatatactgaattctttgttttcttgtcttatagccttatatcagctcaaaggataaaatagtatgaagatttcattttatggatacatatgagacattagattattattttctagctaaatcgtggtaaacacaaattatattataatgaagcttttttcccaataagcattttataagaggaaaacctgaaaacaaacaacaatcagcaaaaagtttatgagtcattcaccctaacaattgtaatagtttccttgttactccattcctgtagtgatgaaccccccgccctttttttgttttgagatggagtctccctctgttgcccaggctggagtgcagtggcgtgatctcggctcactgcaacctccgcctcctgggttcaagcgattctcctgcctcagcctcccaagtagctgggactacaggcatgcgtcaccacgcctggcttgtttttttgtatttttagtagagacggggtttcaccatattggccaggttggtcttgaactcctgaccttgtgatccgcccaccttggcctcccaaagtgctaggatgacccccttttataaaacgtcccatcatgttagctccatatagtagggattagtgacatcaaattctttttgggaatttatagtggcactaggggtagcagtatcatttaactgtgtggcatgtttgggtaggtagcttttctgtttaaaagtaatcacccttccccacccaagggcaactgtactggggatggaggagaggtgtcagcagaaattgcattctcaacatctcaacttccttgctccctgcctaagtgcctcctgaaccatcagcttactataactaaagtttcttgtgttctcttgatttatctcatgctgtacctgtgaaatatttagttaccctcattctctcttttctctctgttttctagagcaacgacatagggcagtggaaaaagaatgagttttggagtcaaaacccctgttatcttggaaaagccatttaacttccttgaccttcagtttcatcttgtgtaaaatcagaataataatgccaaccttatagagtaattttgaaactttttttttttttttttgagttagagtcttcctctgtcacccaggctggagtgcagtggcacgatctcggctcactgcaacctctgcctcccggattcaagagattctcctgcctcagcctcctaagtagctgggattacaggcatacgccaccacgcctaactaatttttgtgtttttagtagagatggggtttcaccatgttggccaggctgatctcgaactcctggcctcaagtgatccgcccaccttgtcctcccaaagtgctgggattacaggtgtgagccaccatggcagctgtaattttgaaacttaatgaggatgtatatttaagtgctttgcaaattgtgtttataatgtatttgttatttttactgtttaattgtctgcccctaccctgttctggagaatcttgtaccatcattaaaataagtaaatccatagtgctattaatcttggaacattctatgtggaattgcccatatgaaaagcagtttgattatgacagaatgccaggcagcagtgttcccattgtgttgaataaatggcatccccacaatcacaatctcaaataccaaaatcaacaaggaaaattccaagcagctgcctttataacttctgatttgtgggccacatttgaaaccacagtttgatttctcagtctacaacattttaattcatagagcaggtctttctctattagcacattctcaagatcttttgttgatcttggtttcagttgctctggagaacaactgccttccaaagctcccttttaaagtaaattttctttttaatagctaattctatttagaggtggaccaagccaagaatagcctccaagttcagtgaccatctttgcagtcatatacaagtgatgcaatcacaaaaagaaagaaacttaattttatgccgctagatatgaaagacaggtagctatgaatgcatggctccaggaccttctgccatgtcaaatgagctaaacccttccccgaaagccagccaggaaaacgtatgataccatttgcaatggtagaatgttgcatgctgttcttctgtaattataatggcctgatccgtgtggagtgggtgagtcctgcttaacaatcgttaatctactgagtcttcgtatcagcctcccatcttgaggagcagcagttcttggctggatgagtcggtctttgatttcattataataaggatagctttgttaaaattccgctgcgcagtggtgcctaaggattctgggaaaaggtttttctttttattttcccctttttttgcacggtggggatgaattgtttctctctcttccatcccctaggttactgtttgtgctctcccttgatctcctgcttgtccctttatttctccacgttgtgaaagtttctttctgtgtgaccaggagtctgtttagcagaccatattgtgagtgaagggccagcgtttgttgcctgattttggcaacgctgggtagtcagctgggatgtaattaagactctgagaacaggctgtcttctccacgggaagggcatgttagatggtgctgggatttggggctgtcagtttggccaaggatggagacagagagctagggacagagatatttcctttcatttataatccctttatgtacagtgtgtgcacttggcaaagtttacatataacctagtggctagagcttacaagccaacgcagtgaaattagcatatgttacatgtattttttagtaatattttaaagcaagtgcatatttccaaagtgaattatgcatggatgacagcaatagggttgtgttgcactgggtgtcaaatcccacaactttttgtcgagactgtgggttttacactaaaaaggcagaaagactaaacgaagtaaaacagttttaatttttaacagtttggttcggcccaaggagccgggctgtgacagatataactgacatttgaataattggattaatttagagaagggcaaatccggttttgacggttgtgcttgtgtgtacatctttttttattattatttgcaggaatggagttgtgtggtttaaatatacactttttgtgctgcctagcaaatcttgagaaaacatcacaaaatttatgaaattatcatttaattaatttgttttaatttatatgtatgtatatgtgtgtgttcacatattatgcagccttcatatgtatataaaagaaattcaccatatatacttgattcgggtctatcagtgatatacatatatacacattgcacatacaagcacattgtatgtgcacttaggaacttagtaaatccagcttgagataatgtgcatgacttcataggatgtatagaaaatgtgcagacaaggaagctcactgtgacattggcaagcccctttcctccccatatcaatgtgttgcaaaacatcacagtgcagaagcagaaaagcctaatttggtatctggggtatcagtagccaaattctacatggttgattcctcagtcctaagttccttcagattcatatggctttttaagtttcatatatgaagataatcttggcaacataaaaccaagtacagcaccatcatcgccaccctcctccagaaattctggtaatgaaatacaccatctaaaatcagcaggccaagtctaggactcgtggcaggcagtcttgaattgtggctgtgggctggctctaagagccttttccccagcaggacattaatagacattaacactctcggacaagaagtgttgatgtgtggtttataatgttagcacccagttaggcaggtataacacatgctgtaggaatcttgtaccaacacatgtgtgtgttgagtcagattaatgagaaccataaaaggagagacatttcacttgagctggggacctcatcctatccttttaccaagtaaaccagtgctcagctgggtggcagtgtcctggtgggatgttttcaatattagcataaggaggatatttgaaagttttgttttgctttgttgttatgtgatcatgaagcccaaactgttagtcagtacagcacattcaaactccttttcatctagtactgtttggctcagaggaaaggaaactttcacgatattcacaactacactatggggcaaaagttattattttcctctctcagatttacctgacccttcttcaagtgtttctgaatgattctgagacactttctggtttactttgtaaatggggcaatgaagcattcttatctcctgactggttctccttagagaattctcaaagccttttaaaattgtgtgtttttctggggcagccttgaaagtcccaggagtgaagttgccatctgtcctttatattaaaagaatcttctgtattgtatacctgatgtgcttgtcccagagatagatattgttaattaaaggacagcatttgtcctttatctgaaataactctcttgcctgaataacagtttcccaagccttaggaaacaggtaaggacattcggcccagagccctgatgtttactaaaggtccttggtccaggagctgtccctcagccttcactagatcagacatgtagactagaaaattacttgcttattttttggggggggcttgttttctattaattcatctaccaacattatggccttttgcatgcgtgtaagtaaatgaacataatatatactgtcattggtagtttgtgctttttttgtggcgactcacaaacagcgagttcccagacattctcaccacactgcatctttatgcaatagatgtgacaggacctatatcctccagtgtcacctctctactactgcacactctctgtttctataccttctgcccctgggaaaagaaaaatgcaaacatctgcctacagcaaacagagccagagttctgccaggtgatagctagaatatgtatagggagaaagaaagcctcgcccgtaacctgctctatctctgtctcaggaaacgcagaaaataatttgtctctgtaatatagaaaagcagttagggtaacgtggctgtgaactgctgcctaaaagtgtgctgtgtgctcgcctctgtagttgctaagcacggaggaggaggctagccagggccttgccacagactaacttcaagaaaagaggaaaagagtgcaccagcagactctggactgaggagcatgtccaacggaggaggcgaggtgtggccaatggttcttttgttgataagaaagaccctgaaattgcctgttgcatggtgaggagagtagtagattggaccgtaattttctggtgacctaacaaaccaaactaaagctcaagtttaataggcaatgattcccgtttaaaagggaattcaaattatttacagttctccatcatcatttgcctcccttaatcatatggactaggaattgggcaggtgacatacaagagggaagccgacttgggtgaaaaacaacaggggctgggcgcggtagctcaagcctgtaatcccagcactttgggaggccaaggcgggtggatcccctgaggtcaggagttcgagaccagcttggctgacatggagaatccccatctctactaaaaatacaaaaataagccggttgtggtggtgggcgcctataatcccaactactcgggaggctgaggcagggagaattgcttgaacctgtgaggcagaggtcatagtgagccgagattgcaccattgtactccagcctgggcaacagggcgagactccatctcaaaaaaaaaaaaaaaaagaaaagaaaaaagaaaaagacaacagggatggtggtgggtatggcaaacaggtgggcacttatgctgtctacaagggacagttgcttccaactccaaacagttattaccttacagaggtgtgggcccaggattgcaagactagatttttcggtgaaagccgccagtgtgacactttttgagttttcagtgttggcagataattcactgttttaaaacatgcagataaaactcaactgtagttggatgtactttacgggttgctagtttgcacacacttatatacataatgcagaacataagtgggaatattctaaataatagacagtgtggaaacttttcttaataatagtaagaaactgagccccaaacaactattaatatgtttagatgtttccctttgggtctttatttactgcatatacattttatatacatgttttaaaatagttgtaatcataggagcctgtgatttttcacttactgttagaagcagtttctttatatgatttataatggctactggatattccatgtagaggatgtattacaatatgcaaaatcatttccttattgttggacctttaagttgcttttgatttaacatagttataagtaatgctgcaattacatatttgcttataccgctttctcctttttttggattagatccttagaatctaaaaggaagattactaagtcaaaagatatgaacgtttttatggcttttggtacatattaccagattgctttccaaaagcgttgcaccaatttacactgcaatcagcaaagtatacatttatccttgaagcattattatatttttgaggtttttccttctaaactggtaggtgaaaattggacttcattgatgtttgagtttgcatttcttgaggttttcccgttaatctgtcgactaattgtatttgttcttacaacatctgtattttctaaggttaaattttgtggaggttttgtttgctttgtgtatatgtgtgtatttttaaagttctctttataacaattgataaataatttgggaacagcccccttggcaaggccttcctctaggggaccccctgtctcagcagtgctgcagctgctacttttaactgtgtgttaactcggagttgggccagggcctaagcaggatccccttcccgaagaggggctcttttgtgtctggtgaaccacaagctcagggctgtatctgccaatatgtttttggcagaagccatctaataaaatcccatccgcgctgttctatgaaatgcagtcacaaatttggatgatgattgcctgatgccatattttggtaacagctaatctccatgtcttagatggtttttattcattgcctccccccttccctccttcaccactctgcttggtgcatgttttaacgacaaatgatgtataatctgagtttcatgtagcatggtctaatggaaaggcactgagccagtcatatggagacaggggtcctattattggcactgccctttgcttaataatagcttaacaactacaacaaatatttatcctgtgctgaaatgctctttcagcattcttcatgtattcttgaatcttcctaacagtcctgttagacaatattattatcctcgtttaggtgaggaaactaaggctcggagtattggaaatttccagtacttgtattggaaagtatgatattggacaagtattttcaatacgtgtgttgaagatattggaaatacttgtccaatatcatccttcatctctctgaactaaaaatgagttttttatttctagtaatctgtctccccatctgcaaaatggagttgcttctcttcaactcagaatggtggcatggaactaaaatgatgccatgtagatattaagttgccttgagtattgaaatccaagacaataaattggtaataatatgtagttattaactagttcacctctgtgactctcagcttcttcattaattaaatgtagggactgaaccagattcatttcattggttactttcagctatcacattttcccatcagccacagactcaaatgttggtggataaagcctgcgtggttcccagaggctgtgcatactgcctacatttcaatcagctctacattttaggtacatccatccctctcagctagtgttcttaggaagaaaatgcaaacttttaggaaggagaaatctcactcttcagtgtttgtggagagtgcagggaaattctcttaatggaatagtagagataccattgtctgacagccactgtaaagccatatggagctgcttgcttttggctctggagatattgtgacctcttaaaatatatttttctaaaaaaggaacatgccttatttctgtttttctttatacttcatccccaggtaggaatttaaccaagatggttaacggagaaagtaaggcattgactcagctccatacaaaaatgcattctggcttgtttgcataaatatcacagaaaaataggggttcaggatcccatatggcacttagcctcctaagcaaagatcatcagccatagacaagaagcaggtggcctggcatcgagagcagaggttatttttgctgctgggctcccgccatttcagagtttaacagtggcaagtctactcagcaggaggctgaccccagatgctctccccttgtcggacatggagccgtcccatgtcccacctccactgctgggagtaaacctgatcaaatctaggccacagttagactcccagataagtctctgtttaagcttattcccatttgctacttaaataccacttccaaatctgattcatttggggtgaagtcacagacttaattgttcacccatcctgggtggctcttgaaagcctgtgataatgatatcttggcattttcttttaggtgaaccctagtgcaacaggttggaaagggctagttttgaggatagtgttagagaccagaggtgtggaaacctggattctgcctctggttctgcctctccctagagctcagtctcactgtgtgtaatatgaagagatttggaccgtgtctggggtttcaaattcagttgccaacagggaagtataaaaaatgaatgagaagggaaaagaaaggaagagggagacccagtggaaaggtgcatgagggaactttggggcgagtgtgaaaatgcatatcgtgattggttgatggttatatgggcatatacatttttcaaaacttgtagaacttatactaaagatctgtccactttaccgtatgtaaaataagtgtaaaatgagtgaaatggactaggtagtaaactgcagagcatatacctcatttaaaaggggcgaatgataagctctagccaatggcttctcttcagaatagaggcccagtgttgctacattttcaagtaaagccagaaattcacatatttatataaaatctcaggatatgtagatttatgggccctgcttggtcaaacaaaatgccagttttgtgatctctgaactttgggcttcttaatttgagtctgaggatcattttagcttcaacattggatgatgccgacttgcggtgagacctcagacaaaaagattaaacttgcctacacctcagtttttttcacctgtaagatgttgataattcatgactaatagtacaggggtctgatgaagagcatatgaggtaccttgtacaaagccactttgaaacatgaataaataacataaaaatgcaagtcactattaccttttttattattataaagaattatttccgtttttagaattgttattgttcagaattgaagcactaaacttagtaaagatggctaataaaaacatcaagattcaccatgagtaaatgacttgcctgcaaatgatcatgcaaacctttcactatccttagaggggaatgtttctgttgtgtgtgacaagaagaaaaggcatttcatttgtacagctactcatataaattgcaaaaaccatgggagctgaagtccaaggtacagcaatagcatataacgaaatgaacttgatgctgtattaaagattctttgtcacacgcactcactgcctaggagtcgtaatgctcccagccttgtcactgacattttgtgaacaagcagcctgtattggatggtgataaatggattatcttaaatgtcattctgcactgttttagagttgcaaagagagttttgatattgagtttttggttagtatattctgtatcaatcctttctgatgaaataatctcctcaagttacatccagaaatgtcaaagttgcttatttcttcaatcacccatagcaatgtttccattacaacgtatgcagagaagattgtgtaataatgtcaaactatttatagaaacatttcctaggaatctctactctccttgagttgtttgtgtatttaatactagagatttgtttttatatgtatatatatatttctatttctaaattgacttcagctgaggatgttgtactttagtttttatatagagcacattgaaaacttggtaatattagcattcgacaactaaaactaaagccacgctaacattttgtaaatagaaagagtcacgtattttggttttaaatattgtaagtttttttttttttggtgttgcagttgcagctgtgtcctaaaggttgtaaggttgttatattcataacaaatttaaacctatttatttagtctaaagtagtatggaatactttgcccaaagaagttttcatatttattttatgctaatttctccattattttatctttaatattttttgactttccaaatttaatacaattattgctattacacagaatttagtcatttgtataaagatttggtctggtggacttgtgtggaaagaagcacaaaatagattttgaaagcatatctcacattttacttggcaaagttattctaaatattggctttcttccctaaagataagatctttctagatacagatattgaaaatactcagttagcatataccgagtggctcccttcagactctctgtactctacgaatcttaccctcatcctgtcattctacagtcctcaaaaaaaaaagacatgtaatttatattttaaaaatccaaacaatataaataatattagattggaccatataaaattactattttttgtagatccaaacagtcacataggagcaattttatgtggctcacccaagcaatgaagatttatattgtatttactacatgccaaacatgtgctggatgtatatgaattcatatactgattatagcaaccctatgagtaggtgctattatttcccctaacctacagatgaaaactttgaggcacagattgattaagtaagtatcagaaccaggcagcctgccaccagagtctttgctgatcatcaggactctgtgctacctctccaaaatagcaaagttccctggctctcccaccccagtgtagtgcttttcactgtaaaaatttaatgatgtctttcatcttacatgtcttaatgtgatattcctttcagctattctaatcaaatatattattcttttctcttacagtttttgtgcattatatctttcttaagatcaactttctttaaaaactatgtttttaaagaaattcactttaatggaattctgatgctttcatagttttgttttcagtgtttacctatttaatccacctgaactttacttttgtgactggttgttgagtagggattaactttattattaggttttcaaatggacgggcaattggcacaacaccttttatggaataaaccattcttgcctccactgatttgaaaagacacttttatcatatactaaatttgcagaaatttatgtgtcaggtttttttttgcctaattaccaaaactttgtgtgtttttagatattatagggccttccctcctccattttctttttagaaaatttcgttaactgttttcatgccctttttgtcagatgaatcttagattccgatagtcagattccataaaaaattttaaatcctgttggcattttaatataaatgcattgaatttataggtatatatgttggagaattttttaaatgtcacctcatctattaacatgttttatttcttcatttatttatgtcatcttttgtgttcttaaatgagttttaaaattttcttcacattctcctttatttctagatatttgtgtttattgctgttgtaatggaattacagatatgtctggtagctgttgagtttttgcattcatatagttaccttactaaattttattagttctggtagtttttcatttgattcttctggaatttctaagtaaggaattaaataatccaaaataaaatgatgttgcctttctctctccaatgtacttttgttggtctctttttcctgtcttggctgatattttttggaataatgttaactagtagtagggataataggcaccctttgattttttttcctgttgttaattaggatatttcaaaagttttgcagttaacctggagatttgctgagatttctgatcaatatcctttattaagtaaaataattcttattctctttaattctctttaatggttgttgcatttaatcagatattgttttgaggggaggaggttatctactgagatgatgacatgggttttctcctttgttctttaaatgtggcctattacattattggatcttatattgttgaatcatctttccatttctgaaatagagcttactgtatcttgaggtaatatatgcaggaacttaatttggtgacattttatatataattttctataggtgatatttttctatagcagtattttctgatgctctctgaccctggttaacaggtctcagtagaactcattcattcctaacatttctgtgatgttactgttttgaagcttatccaaagcttgattggcttttgattattttagcattaaggcttttgcatgcaatttccctcaaatctttgaagtttatttctgtttatagctttccttaggaaaggcatgagtttactctttcaacttttttgctcttgcctcctatcttctttatggggagagagtatacatatttctttgaagcatgatgagtataaatatttctttgacatctttatgaaacctggaattgtctcttttcatttggaaagaaataaacttttcttgctcatcattctttatgcataaaactatagttttagttagtcctgatttatatgcagtgttcccctagaaagagatatttatttatttatttatagacagggtcttgctttggtgttcaggttggaatgcagtgctgcaatcatagctcactgcagcctcaaactcctgggctcagaggatcctcctacctgtctcccaggtagcaagtactacaggcatgcaccactatgactggctaatttttaaaaaaattttttttgtagagataggggtctcactgtattgcccaggctagatatttagtattttataatgagaaacagtgaggttagagaagacactattgtttcattttatgcatgtatgtcacccttggcaaatatcactaatctcgatgcacattttccttctaaacttgtatatagccttcttaacatggcacaccaaatagttactaccaattgattggtacttgcaatttaaatgagacctatttgcaccccctagtatggaaacagcagtctttggatgccaggagtcctaagctttcagtctctaatttgcagtgtgaaacatcaagctatttcaaaatttaatcttagttttcacagctatacaatgaagagattaaactggataatataatggattttctgattctgtttacatatgctccttcattatttcagggccaaacatcgttttaggttttgtaaattacgactaaactgtgtatttgtaactttattattactattttgttgttttcttgttcatttgtggttttgagattgtaaatacatctgccatttagctaattctcttttgtggccaagtactttttcttacttttaaaattaataaaggctcattgtagaaaatttgaaaattgtagaaaagcacaaaaggaaaataaaaattacccataatcaccgggtgcggtggctcacatctgtaatcccagcactttgggaggccaaggtgggtggatcagttgaggccaggagtttgagaccagcctggccaacatggtgaaaccccttctctactaaaaatacaaaaattagctaggcatggtggcacacgtgcctgtaatcccagcaactcgggaggctgaggcatgacaattgcatgaactcaggagacagaagttgcagtgagctgagatcatgccgctgcactccggcctgggaggtagagcgagactctgtctcaaaaaaaaaccaaaaaagtacccataatcctaccacccagaaggttaacatttggttatgattagaaatatttctgtttttaaaatcgttatactctttttcatagaatattattacatacatcactgaaaaataattttcctcaatatatacaatcatttatttttatcatatctctttagggtttcacttttaaatattatgacagacatccttttataagaatctttgaggctttcttgaacagattcctagatatggaattactaggtaaaggagagtgtacattgtaagttcctaacaaattacaggttcttgaaaaatatatctggaatggatgtttgaataaaatattgccaatttgatttctagaaagatggaccaatttacagattcatcaagagagaatgcctctcccatctcaagtttggcagcatggaatattacagtttgaaaacatcttttccaattttatggactaaaagtaacagaatttctttatcactactgtgattggatcttttttatgtttatggctgtgtgtgtgtgtgtgtgtgtgtgtgtgtgtgcgcgcgtgtgtgaatttcttgtcctctacattttccccttccttttgtggcgtacatgttaactgttaacagctgcagtgcctatgagctcattatcaaagtgttgctccataatttacaattatacctaactttgggggcaaaatcccaatttggaggtcaaaaagagaccaaagtctctgtacatctcacatgactttacttgcattaactttgccttcctaaattacagtctataattaagaagtgctagtctcctggccagctcttatggttatttttgaagctccttgggtgcttgcacccttccagagggctgttactttgccccctctctggaagctcatttgcttccacaggaagccttaagccaaagcacattggcttattcaatctggtgtctggatcttaaaacctggcttctcagtttatgatgctcaccagtaaaacactcatggctcttcttgccatgaagcgaaccaggcttgcttagcttagcttcatgtgtggccttcgtgaatcaaaataagaagaaggtagaactagtcccacccttaagtcaagaagaactggttagtcatgaagtgaagccacatgactttgctcttttctattatgtcttctaattgtttctgacaagaatccctggatttctctcacactcttctagcttgatgctattgggctccttttaccgaacaattgtgaaattagtaactaacctctgcttgctgatgagattgtttgacagccgtttgctacctggaaaccagaatggctggaaagagacctgtttatgcatttttcatgttaaatgctaggcaaagaggttataccctacatgtggactctaagctaaggaagctgacacgtggggagggaaaagggctgaaatccaatgcatacgcccctcttcaatcctgggagattgtatttgcccgtcagaggcacctttttctaatttgcccagaggtgctgaaaaggcggctgaggccctgctcaactgcctgaacaacttacagaagcacctctccttccaaccaggttaggatccaaaaagctgtatgtaaaacctcttgtttataaatccaaggtggcattaagcagccactgggagtatgatctgttagggacaggcttttgctccagtatttaggcttgttcttatcagtaaatctaaatagaaagttcctaagtaaagaagcttccgtatttaaatagctcaaaatacgacagccttatttttttaatagcggcattgtttctctttcccaaagcaaccataactgagacaggattagatgcaaaaaccacttgctgatacagtttagaattgcaaaattctaaattccaacagattcatattatacacaagtataaacagagtgtagccagttttcctcaaagagataacatgggttctccacagtatttttgacccaacaagccattattaaatttggagagaaatttttgcctgggaaccttggctcacacctgtaatccagcattttgggaggctgaggcaggaggatcacttgaggccaaaagttttgagaccagcctgggcagcatagcaatgctctgtccatacaacaagtttaaaaattagctgggtatggtggtgtgtgcctgtaggcccagctaatcagaaggctgaggcgggaggatcgcgtgaacccaggaggttgaagctgcaataagccatggttgtgccactgcattccagcctaggcaacagagcaagaccccatctctaaaacaaatgggagtagagttctaatggcatccaaaggtaaaggcccatattccctggtgttccccaaatcattgcaacaaaaaagcaaagccatttaccctctaagtaatgtcagtaaacaatgaaggaaaacctgaagccttcctgcttaagagccattctgaggcctggcatggtggctcacgcctgtaatctcaacactttgggaggccaagacgggcgaatcacctgaggtcaggagtttgagactagcctggccaacatggtgaaaccccatctctactaaacatgcgaaaattaggtccgggtgcggtggctcacacctgtaatcccagtactttgggaggccgaggcgggcagaccatctgaggtcagcagtttgagaccagcctggccaacatgatgaaaccctatctctactaaaaatacaaaaaattagccgagcgtggtggcaggcacctgcaatcccagctcgtcatgaggctgaggcagaagaatcgcttgaacctgggaggcggaggttgcagtgagccaagatcgcaccactgcactctagcctgggcaacaagagtgaagctctgtttccaaaaaaaaaaaaaaaaaattagctgggcatggtggcatatgcctgtaattccagctactcaggaggctgaggcggtagaatcatttgaacccaggaggtgaagtttgcagtgagccaagattgtgccactgcactccagcctgggcgacagagcgagactctgttaaaaaaaaaaacaaaaaacaagacattcttagcttcatttcaatatctccatcctaagccttagagaaaacttcagtcctcacctcaccacattctgttattagaaggcattaagaaggaggtgttctaagttcttctcaaccttattgaggatgaaggtgaagggttgtacccttacaatagggcatggtatacctccaatacacctcttttcttttgtctgcccatgtttgtgactatgatgtcctaaagcactttatgtgagacttagattttcttttttcatggtgtaagttaaatatgaagtaatcttgattaggccttttgttcacagaaccaatgaactgatgaaaaccttgatgatattcatgtgtctaatgttatcatcggaggggtttcagtgaaacagcttaactttaggttcagagaggtttcattctcacaccagatccagaagttactattataatacctgcttgcatgaacttgttcatggtactcactggtacaaatttatggcttcaagtgatagaatgctcagtaatattgccctcttggaagctgtgcccaagaaacttagtttcctaactgggctctgcagctgttgaaacttcatcacctttcacctgaatctctacaatgctttgcaaatgaggagctggtgagaaaaatatgcagctcgaagctggcaaagttttaagtgggtaaagcttgcagtgttaagatcatagccccaaattacttaagggcttctgctaacatgaaaataagactcttgactgctgagagattggatattcagatagatttttttatgaaggaaataaatatttcaacatgcaaacactacccaagcgggtagtgatgcttcaaaacagggtcagaggtcaggtttttttctgtttgtgttttttgggatggctccaagtttaaaggtattacacatcactacctaccccgagcctcacatggtaaagtaattactgctagctagcggaaaatatgtacattcatttttatttccaaagatcctgagatttctctctgcgctttttgtggtcctcattataaaaaatatatcatgaagaatgatggtttttctccatcctaacggtaaaagagtcaagctgaaaatgcatgtctgatactcaacttttttaacaaacttaattttggaggaataaataagcatagaatgtatttattctttagagaatagtagagttcatttttatagtttgcctttaaaacatgcaacagacccctagggtattggataatttttagaggagatgctgacctggtggtcagccattttgacggaactggggcccaggatatcttcaggcaagcataaagatgtgtggcatacattgttctgaaacttaaacactgactttctcagtggagtggaatttgggtgactgttggaattgctaaacaggacttagagtttcagaaacccttttctctctgccttcaagtagggaaaataattatttgctgagcaattaattcgaattcacaaacacacacacacacacacatcagatatggtaagctcagatctctgcagaagccggcaggtaatgtcaacgagtgaagcaggggttggtgtaatacattagggagttgtggggacaagaaagaactagaaagcacacccccggtctaagaggacaaccagcactctgctcccagccagctgctgccatgagagaatatgggcccactgttgtgtacggctcagggtttttgttttctgtttttccaaaagaagccagaaatccagatgtttgtatgaaaggtatttttataaaaattttgacaactaatataaaacactatttgaaaatgtatttgagggctagctttggcctacaagccactaggttgtaacttcagctttcaaaaattgcaaaaggtagagccagctgcttagtggccataccttctcattctccaagggaggtgtttggagcctggtgcattctaaacaatgactgttctgtggcttaaaaccctattgtgaagaacacagttactctgaaattgagggcagcttgtctcatttatatcatttctttttagtgacacagatccttcgttaaggccaacttttaagggagtcaagttgcagaaaagtttacagggcataaccaccctcaccttgcttttcttactgacttttaaccatcacaaagtaattactttccctcctctatccctcccttggaatgggtctttttttttttttttttttttttttttgactcactctctcgcccaggctggaatacaatgatgccatgatggctcactgcagactcgacctccccagctcaagtgatcctcccacctcagcctcctgagtagcagggtctacagcgcccaccacgatacctgactactttgtatttttttgcagagacagggtcttgccatgttgcctagcctggtctcaaactcctgggctcaagccatcctcctgccccaacctcccaaagtattgggattactggcgtgagctactgtgcccatccagaatgtgttactttttaaagtacattgtgaggcaggacagtattcacattgcctttcccagagcccctaaagcatcaactgaagatggtgtccctactgcagtcaaacagaaatgctgagtaatgactggtttaataatgatcagatagacgagaaaaggccttgactaagtcagtgatattgggatatgattattttaattattttaatattgattcttttggtgtcttttggattgtttagctgtcgctttttctcttggcttttgaggtttcaggacacggagtaaaatgatggaaatgtgtttgtttttcagggcagagaggagtgttggtaagtagagaaattacattgtgtcctcagctgccattgatgtccttccaaataggtgaagtttagtttaaaacctgccgttaatttctggcctctggcaagagtggtacaaggttacctgtttgttccagtatgtgtagggaggggctgggggttggggagagagaagggtggcaattagtcaatgacatttatgacccatttataaaatacaaatgaaataattggttacaaaatcatgacaagccttcacttgtcttttacaaacttgttctcaacacactgtgaaacttaatggacaccctttgtagaaagtgaggaacaacagccattctgaagagaccgattcaaagcgttcaacctgagactagctgtggtggcgaagattctctgagtatgtttctcattctcatctcagatacccgcattattatcgcagatccagaggcagggaatttgtagattcctcagccagggaattgccacagttttggtgtaggatgaccagacatgagaaagaaaaaaattttcccacaaatctttaaatgcatgggaccctttggggtctttgctgagattagagcactgtgtgtttataaataaaagaagaataaacaaaggcagcatgcactggcagtcccctccttcctgccctgttaaaatgctgtgtgaggtggcatcgagaaaatgaacgccaaggttgacaccaaatgtagggcccgagtgatttttctgtttttcaaatccgctgtcagttctccacctctgactcttagtctttttctccttccccacctctagagagaggacatttcctgagtaaaatgaaaatcaaagctaggagctaatcatatttttaaagtcagatatgttgggggtataactggaagctaatttttaaaagaatcctgccatatctttgataaggaagttctatggcttaaagagtgtaaccactagttttagcagagatgtttcctttagttttgaaacattcttcaacatttcaggttcatgatgaaaaatggctgactggatttaagtcctttattttctatactcctgagcaaaattctgaaaaactggctggtctagtttagagaagaacgctgatgtgggagtattttcaccatgcattcctgctctaaatcctttgcttctactgatagactattctactttcgaaataagttcacattgctctaacacttcataagttcaatctttttctcattctgtttaaaataaccaccatgaccaccaaacgcctgaaattcactgtagttaaaattatgactgaaatagacagggaaaacctgagagtgaacgttacccagcaaatctgggttaaacaggttcgagtttttccagagcacactgtttaggatttcagcttcctgttcaaccatctcggaaacagggtgtttctctgctcctttgtgaggactaaccatgtgtccccgccactttgcaccaaagctgaatatcatcccaaactctggatccttctgacgggcatttgtgtggtacacaggaaggggtgcattatgaatatgcaattactggcatgtaatgctgtcttctgctaaaaatacaaaaagggtactctgatctcagagttgggagctgatttctgatttcagcctagacaggtctgcttaaaactataatcaagctgattgtattgccctggaattctaatttccaatttagggttttgctatataatctctagtagagtgtgtctaatctttatgaaacccagagtctttgtataaactctatggattttcttccatgcgtctaggctgagctgagctgtgtctttaggctgagctgtagagacattaaattactgagtaaatgaaggtaacgttgttatgtcactctgtttctgaaagaccaactcaaattctgtctgctgtagctttgatccttttcatttaattctaagtacacttgttattatagtaactgttgtttgtatgttattttagctttttacttaagtagctatttagcaatttaaatgaaaatgtaattaggttacatctgttttacatgcatgtaataccacgcagatgtaaacttctattaaagccatattttctttttggcaagaaaaggcagaaacaaaatcgtgccagtcgctggaatacgtcttgctctaaaaaaattaaaaaaaaggatatacagagcactgtgccattatttatatggtggttagagtacatcacttctattttttgaaaattaaaaaaaatattaacaagtgaaaaacaagcattctattccatgttccctcttacagtttatctggatacggtgtttaaaatgacaatacagccaggcgcggtggctcacgcctgtaatcccagcactttgggaggccgagacaggtggatcacctgaggtcagaagttcaagatcagcctagccaatgtggaaaaaccccatctctactaaaactacaaaaaaattagctgggcatggtggcatgcgcctgtaatcccagctactcgggaggctgaggcaggaaaattgcttgaacccaggaggcggatgttacagtgaaccgagattgcgccactgcactcaagcctgggccacagagaaagactctgtctcaaaaaaaaaaaaaaagaaaagaaaagaaaaatgacagtatggcttccccccattctatgggtttgtgcacacagaaatacacccatcctcccatcataaacactggttcttccaactccacagatagtggaaagagtcaagaagcagccgagattctaacctagctctgctttatgactttggtaaagccattttactcttcagtattattattttttaaaaccaagagtaatatttgcccagtttgcctcatagacatgttgtgaggctcaagggagataatgaatatgtaggtactttgaaaagtataaaatgcaattgttagaaagtattattagtatattagtctgaaaacagcataagcagtaagccccccagatacccccacatttttgtgtgtacaatggggattgaacttagaaaattaattctcctgttttgggaaccattgcctcccttatagcctgttaataggatttataaaacatcatttcagacaaagtcatttatcttatttgctaatgagacacaaaatttggactgtctggaaccaggtaacattttaagagttgcccatttgtttcatacacgttcagcttttcagtgcagtcatttttaatggtggtttttatagcatcaataaaaatattttcatataattcttccttgtaaatatggttaaacttttagctttctactacttggtgacctgttaaataacttaatgtactttgaaattgattgttcagtgccaagacaataagaagccaggaggagccagctttattttttacgttggggccttaagttgggctatgaagaaaaaattctggcagggtttgccacatccaacttttaagggtttttttaatctgtaagagggaacatggactagaatgcttgtttctctttcctgtctgtcttaagtagtatcttagatggcaaggaaaggaaatattctacccatgtcataacatatctaccatttattgagcacctactatgtgccaagttgtattctaaatgcttcatgtattatctcatctgatccttaaggcagactcataggtaggtactactgttatctcctattttataggtgaagaaattgaagtctagagaggttaagaattttctcaaggtaagatagctagtaaatggtagagctaggggtttaaccttggccatctggcaaccaagacataggtttgaacccattatgcctcatcatacctcataatacctagtattataaggggttttgttgttttttctttgtattggttttgtcatctgaatcaaacgtctttgacctagaaagaatcttaaaatatgcttctgccgcctccctcttttatcccaattcagaaaaccattttttgggagacctaggtgccataaaaatgaaaagaaatgaggcatggtgctcatggtactcacagttcagttagtgaggggggttggtaagtaaaggggtatggctaagtagcccgccaaggaggatgacatgtgcactaagctgatacttggctgatgtgctctgagaggccagagcaggcagcagtcaaggtcaagcaaagcttcatttgacctgggcgtgaaagaatgtgcaggactgtggtaagcaaaggagacaggtggcatttcaagcttcaggaatagaatgaacagggagttggaggaaagaaaacacaaaatggcctgttacaatagttaaggcaagagatggggaaaccttcaacctggtcaccagcagacgacataaagcaggaaataaaatgacattgcaaaggcaaggtgatgggatttggcaattgattagcagttgggagggagagcactggaggcaggtactggggtctcgaacccagtaggatagtaggaatgttaatcataaaaggcaactccgatttgggaacactcattgtagttggggaggtagaatagggtagacggcaagaacttggactctatattcagatggtcctgggtggcaatctgtgctctcccacttactggtagagttactttcagcaagtcacttgtttagactctagtctcctcatctataaggcgggaataatattaacacagctgacacttgagcaacacaggtttacactgtgcaggtccacttatacgtggatctttcaaaataaaagctgcaccaagtatgcctgcctctcctgcctccccttccacctcttctgcctctgccacctccaagacagcaagacccacccctccactccctcctcctcctcctcctcctcttcagcctactcaaagtggagacaatgaggatgaagacctttaagatgatccacttccacttaatgaatagtaaatacattttctcttcttcgtgattttcttaacattttcttttctctagcttactttattgtaagaatacagtatagaatgtgtgtgtacatataaaaaatatatgctaattgactgtttatgtgaatcagtaaggctgccggtcaacagcaagctattaatagttaaatttgggaggagtcaaaatttatacataaattttagcctgcagggggtcgagtgccccaatccctacactgttcaaaggtcacgtatagtgacctcatagtgttattggagctcaggtagtacctgtagcatgcatagcacagtgccttatagcatacattcaataaataccacttagtagcctcttggctactactcactcatttgggtgagtaggattttatccccattttatagatgaggatgctaaaatttgagtaggtagagtagctttccagagtcctaaagccagtaaagcctggcaggggtgagtagagacccaggctcctgccttgtggtgtagtttctgacttcaattgtaggtcacttgctgccctcacaccagacagcggcaggccaagtcttctggtgctgttactttgaccttcctcccataaaggctggatgtagcagaggcaggcactgtctcttctcttaccttctgtggccatttactgagcatgtatggtgtgtctcacatgcttttacatgctttgcatacatttctttttccttttctttttattttattttattttattttatttttgagacagagtcttgctttgttgcccaggctggagtgcagttgtatgatctcggctcattgcaacatccacctccagggttcaagcaattctcctgcctccgcctccaaagtagctgacatttcaggtgcccgccaccacgcctggctaatttatgtatttttagtagagacagggtttcaccatgttggccaggctggtcccgaactccggacctcatgtgatccacccgcctcggcctcccaaagtgctgggattacagtgctttgcatacatttctaatgactgagtataggttttcattttctccctttgctttcttcctataaatcagacagtcatttttttctagagtccttttcagcaccccagagggagttgtatccttttgtgtgtgccctgtggaattttcatggcaacataagttgtatttcttcatgactcactgccataggaagaccacccaaaacataccctcttctgtaacccaaatctcagcgtgtgtccttattttccttgttttcagcatgtccaagtgaagccattaagtaggtaatatactgttagacacagatcgtggtgcttgggaaaacaacacccaagcctcgtgattaataagcactgttaattgttaagctgctcttgctggtgtctgacctcacggggtttgtgctgtgacagctctttcatgttgatgaggtaaatgagtctctgccatgatggccgggagaagccaggacagagtatcagatcgtgtttcaccaggaaaacaaggttgatttactgtgttacacgagggtgaagtggacccagcaccactgcaccccgtgctttgattcccttgtatgctaaatatgcaagcacaaaacagctttaacacaattttttacctagaaaggagcctggggctgcatccaagtacatttaacatgtgaaaattgagctgctttgaacttgtatgtttttgataactgcttggtatgcttcctggaggatcacctgtaggcttttctttccaaatcctaatccctttgattgagtgccaggacagatagctctcattgaataactccagtctcataattcttccttcattcagagttgaaagggaacagctccagattcaataggcacatcctcagatttagctgaagtcattcaaacactttaaaactgaaattgttttgttctgaagtagggttcagttgggctactgaatgtttacacaagccagttgctgccaggaactgtaggatggggaagaaaaccacacttctccccgcctccacccagcccccttgccttgcttctctctgcctctgtaaccaagaaggattacaaggacgactttgagcgttagaagtttcaaagcaacctggcaggattgtttgtaaacgtgggcataagaacgtgcttgactcttcttgttttctgtcctccatgagaccaggctgaacactcctcccctctcctcccaacccccttttggaggaaggaaaacaaccatgttctttttatctttacaaatgtgcctggtggggactaatctaaaccagttcaagatgcttttgcttaagcctgtttagaggaacggaaggtgctgcagaaatggaaatagagtggtatatgggcctctttgccaccccgctcctgagctcgctgcctcttttttgtttttgtgggtttcttggcacctacctagatttctgctgagatctctgtttcaggtcttttcagagatcatgtttcctaaaagatggttcctttctgctggacatcctgtctctgtcctatttggccagatagtacttcagttgggaaaagccatctttctcttcgtgcctggtgccctatttcagaaggaagcctgaaaagtcatttccatattctgtgtgtgattgcgtcctgcctagcttatcacagtggttgttccctctcggatgaacaattcctaccctcctctttgcccagcagatgaaggcaaggattgtaacccattattagagtattgaggacctgagttccccactcatgttgaacttgaggcaagactgggcggtttattcccctctggctactctcccacttgtaaaatgaggcgacatctctaatcattgacaccaaacaagaacatagcctaataataaaatgaatggtgttatatggtcatgaagaaggttcaagactggaatctactccataaggaaggacacaaaaagattcaacagtgatttagacaaatctcatctgaacacattttacagatgcctgttgaactaaaagttctgtctaggactgtagtaagatttgacccggcttagcctgggaattttgacccactgatggtagaagtttattaacagccctattcatttagatccttccctgtttctacttttctcgttctctccccggagggtttttatgacgttgtaatcatttataattttaaaatgtcttcaatcgtgcttaaaaacagcacttgattttaatgggtactgcttaaccatagaaagattgtgtctgtattactgtcggttcttacaacaatactttggaacgaaagtagaaagtttatgacacattttattatattcctaaatgtgaaagaggattctaatttaaaaataagtggccatactttttaattcttatttagcctctgtagctgttttaatatcccttttatggttgactggtcgatgttttaaaacaagttcttcagggactctgcccattagtctttggcaataaaatctgaactttactaaaataaaacatgaagccatggagtaattaagaggggaactttcagagatgaccgtgaatatgaaatacagtgatttgtattattaatggatttggggaaaaccagcccacctcttttaagctcaactatgtgtatttggggggttttatatttttaatttatttctttgtttctctcaaggcagtaggggttccatcgcaagctcttaagatctaccaatcctccttttgtagcctgctgcttctgaatatgagcctttcttttttcattttatttggaaaatggggtgatgtcacttaggaaagcatttttcccaaaagtggtttcaggaaccagaatctggtgaagtgttatttaaaagcgataacatagtaaagctctgctttgtgcttcaaataattgtaggatttacgggatatatccctaacctgttcagttttatggaaggacaaaatacagggattcattttatcatagtttcttaaaaactttgaaacccagttgacagtcatttctctagcattataataagctctttgtgtttataaacctagttcatagtaatttttggagtgctgcaatttggtagttatttaatttgcaaatgggattggcctctctaacctctaaaggaactagttccttttaatgctttaaaactttcattgactctcaattgccaactgcaggaaaaagttcaggttttaaaagtccttacatgcgtttcagcctcctctccctgtttcctttatgaacagccccctcccactccctttctttcaatggtaggtctgctgcagaacattctgcatctcttaaactttatatgcactgtatttttcagtctccattcctctgctcatattgtgttctctccatggattctttctttttattatttaattttttttaagggatagggtctcactctgttgccccaggctggagtacagtggcaccatcatagctcgctcgtagctcactgtggcctccaactcctgagctctagtgatcctcccacctcagcctcctaagtagctgggatacaggaacgcaccaccatgacaggccaatttttaaattattttttgtagagacagggtttcactgtattgcccaggctggtctcaaattcctagcctcaggcaatccttctgcctcagcctcccaaagcgctgggatgacaggtgtgagccaccaggcctggcctcagggatttcttctttaccatgtcatagtctccaaaattgtgcccttcctttctgtcaactcaagtgtttcctcctttttttttttctgagacaaggtctcgctctgttgtccggactgcagtacagtggtgcaatctctgctcacagcaatttccgtctcccaggttcaaacaattctcgtgcctcagcctcccgagtagctgggtttacaggtggacactaccactcccagctaatttttgtattttttggtagagacgggtttcaccatgttggccaggctggtctcaaactcctgacctcaagtgatccgcccgtctcggcctcctcttaagaggtattttttactctgtatccagagcttcctcatatacccatgcagcatgtggaaaacagcctgtactgctgtatgcagtggccctgttggaatccttctgcttcccagcgaattgcccacaccccagaccatggcactgtctccagatcttcagcattgcagttatcatgttaaacttagctatttgtgtatatgattgtctcgttcaccaaacagtgagcccgttgagggcgaagttgtcttaaatggctttgtgtccccaactgccaccagggagatgcatagtaactagccaatgaatgaatgttttcttcccttaaaaaataccaacagatgcctaacataagcaattaagtgagggaaagcttttttgccattttaaaagtcattcgtcagcccacacgataccactgaggaagcctcatgtgagagctaatgaacattaaacccagacaccatcgggagctcaccagaaacccatggctggctagtgagagacccggggctagaaacttgatattttggtttcacagccaggtaccctggcagccacaccagtgttatgctggcaggcatgctttgtctgctatctgtggcgtgaactttactaaaatgaaacatgatgccatggagcaaattaagaggaaagctttcagagatgaccatgtatatgaaacacagttcctactccgcctccttcaccccaatgagagaatccaaattttatttaactggtgcatagaggtctcttgatttgggggaagatgggtccctctgccagcctgagatggtaaatcacgcttgggttaagccagtcatcgaattcctgttcccctttgctggatgctcattttcccgggttcccttgcaagtcaggggctgtgtgacaagttctgacctgtgagacacaaggccaagtccactaggagaattctgggaaggattttcttcctggtaaaaagacagagcctcatgtttgccaaaagagcctgattctctgccctttcagaggcttcctgcctttgcacacagtgacaagacatgatgctggggctttagcagccaccacgaggtgacaggtaggaggacaaaagtgattacattgatgttggtgaagcaggatagaaagagcctgggtccacaatgaccaaccttgaaacctcccatttccagacttctggttcaataagaagcaccccgatggtttcatcttttgacggttggttttttgctgcttgaaacaggacacatcctaactgattcagttacttttagaaggaaaaataaaagtggagacagcatcctaagaggaaaggtggtgactggataaactatatggaagtcctgacaacatcatatttaagaaatttggtggctggcctctattcttctgttaggtgtaaggaagacccactgagtaacactggagcattcatcattcaagaaacattatattttaatcttggatattcctagcactatgcaggattctgaggatgcagaaataaaaggcagtttctatccttaaggaacttggagcctagtaagggagactagtgagtaaacaattacctgagagtatgaggatcactctcttttgataggggtattgtattagctcttatgctgctgatatgcctgagactgggtaatttataaaggaaagaggtttaattgactcacagttccacagggctgaggaggcctcaggaaactgacagtcatggcagaaggagaagcaaacacatccttcttcacatggtggcagcaaggagaagtgtcgagcaaaagggggaaaagccccttataaaaccattggatctcaggccgggcacgggggctcacacctgtaatcccagcactttgggaggccgaggcaggcagatcacctgaggtcaggagttcaagaccagcctggccaacatggtgaaaccccgtctgtactaaaaatacaaaaaaaatttagcctggcgtggtggcgggtgcctgtaatctcagctgttcagaaggctgaggcaagagaatcacttgaacccaggagacagaggttgcagtgagccgagattgtgccattgcactccaggcaatggagtggagcaagactctatctaaagaaaaaaaagaaagaaagaaggaaagaaagagagagagagagagagagaaaagagagagggagagaaagaaggaaggaaggagaaagaaagaaggaaggaaggagagagagagaaagaaagaaagaaagagaaaccatcagatctcgtgagaactcaatcactatcagcatgggggtaaccgcccccatgattcaattatctaccactgagtccctcccacaacacatggggatttggggaactacaattcaagatgagatttgggtggggacacagccaaaccgtatcaggtgtgtttggggtactatcggagatcagatcaggaccacaaaacctggataggctggggaacaggagaaatcaggaaatgtttcctggcagaaataatggctaagtcaaatcttgaagaagggataggattttgccagaccaagaaagacaaggaaagaaggggcggggcggggtgggagtgggggggtggtgcagtatacaaaacagaggggacgtgttataaggcagagaggtatgagagaaatagaacattcagaaactgtccttcttaatatttttgccatatttgatttggatctttttttttttaggaaaaagctgctgatggctacaaatgtgtctgttatgttattctctatacttgttatttcaaaaatattttataaaaatttgtgagtgaataaatgagaggggagaaaggaaggcaatgagtatgaatcatcattctgattttaagcataataaaagcaggaggtgacttccacagtcaaatacatttgggaaataatagaaaattaaatagtgttcattattgtgagaattcccagaacccttaatattcccatgttgattgttactgtccaagatggggccactgtctagcgcacttcctaggatagatttgtccataggcccctcttttatgtaaccatctgccgaactgaggccttggaaaggcttgatgtagaccgctctttcagaaaacttgaccgagaagggaagtacgcttctagggtagcatcagagcagaacatggggaaagggagacatttcacaagaagggagagtcaagatcatgtgtatttatttgccaagggcaaaaagcagtagtgaggaaaagcaaacaaaaaccagttgaagacacagcaacagaggagaatgattgacaaagtaagcaaggtgcttgaggttacaaaagggatcagctattaaaggacttctgctagtgtctacttgtcatcttcaagatggcacaatttttacagtaccatgtatctgtgttgcaggagaaggtaggcctctcaatcagagacttagcctataaaccagcatctacatagtgaatctaggtatccctcagtgttcttctatttataaggaacagaaaacccaacttaaattgacttacgtaaaaagagtttgttggttggtgtaattgaaaagtacatggttaactagcttcaggcatagcttgatccaggtattaactatgtcaccaagatccatctcactgctcataagccctctcagttggctctattcttatgttcctcatggctcctggaaactttagcctctttccttctggttgcaggatggttgtagctccatagacatcacatctgccctcacactgcaactcctatgaagaggaaacaccttatttctcaggagccccaccctcttactattagtctgattgaattatatgtccatccttgaaccaattcttatgaccaggaataaggcatagtccccatgtatgtaacttctttctcctgagttgtacaaattatcaaaggaaaaccaagaggattatatctcaagagtggattatgttaagaaagtaaccctttccctccaaaaaaggaaacttccataacagaacccttagatttttacccagtgtgattttaaactctaaatgctggaatgtttagggtcccaggtctgacagcatgaattagatccctccatgtggagcacccaagtaagtgaagggtgttgacagccatcatggggaatgctgatgcttactgaagaagccatgcaataaatcctctttagaaataaacaaaaagcagcttttgagaacccggcttttacccaagaccaaaacctgtcagccacaggcagaagtcattaggcaggatttatatgtgctggtatccaacactgagtcaaaaggagatccgtagaggggatttctctcttccggaaacccagcagaggaacggggaagactttccgggtaaagtttcagagaacctaatgcataaatccccttaacaaacactgggatttgggtttgtaactcatctctcccagcttaggtcctgtggagacaagctgtcatagggctgacacaaccaaatcaagaaaggaaagagtagaatttatagtgaaaatcaggaagctacttaaaatggtgggtttctcagaatgtggtactgcacattttttgcttggtagtccctgaacagttattaaagaccccatggaagcagatggatgctggccagtaggcattgtccccttttatatttataacttcactgaccttcattttacctctaatagagattgtaccattaattggctggattctcccaagctctgtggcaagtaagaatggaaaagtggattttctccgtactccattgcagaggatatcattaatttgctaggtttcgttcccacagggaaatgttaaaaaccagtacagttggttcttcgccactctggattgacagacattctttgtgtaggtgcctctggctttgagaaacgaggccagagtctatatgcagacagtgagcagtgatcttccgtttcctacttgttgcagtagacataaaatcagggcaaatggtgagttccagaggaaaggatccagcatgcagcctgctgaataagagaacaggaatgatctcgaatgatgataaatgtttatactctattagagctttggccatgggtttggccaccattcaattgcctctacagctgattttttatgtggcttttcttttctttctcctgtttggttgcaaacttattttgactgaggatttacttgtcacctcatgttgacatttcaagttattgcattgagaaaaacataggagaaagcaaacaagcaagtatattccaacggtcaacaggcacagaagtcatactcacatttcaaagaaaaacaggagagttgaaatagagaatggagaacagatgtatttatgaggggggaaatcttcttggcatttgagctcaagtcagattctggattctggatagttttctcagctaatggtgattcctaggactgctaagcgggggacattctggtctaaccgaagttgccatgtaattctgtggaatcatactaacattttgatttctctgattataagtgactgcagcaacaaagagagtaactctgttgtaagaactgtttccacagtgtctctagggacagttttgctttagtctgtaaattctccaaaggcaagctgagactatgtaaattaaagaaatagagccagtgacaaccaaccctgtggttttatttgattttccaaaacacatgtccatcggtatgtctcagacaacacgatatgattaaagcacggtaataatcacccatatattgcattttaattggtataatgtatgatgaatagtgaagttggaaccatggggcatactttcacatttaaggtatttctttgatttatcagaatttctaagaacataaaatagaagtcagaaagtctgttttctgagctgggacctgccattcatcagctgtgtgatcttgggtatgttactttatttctctgggccccattttccccagctataaaatgaggggtttaaactagatgagctctaaagagcttttcacttcggagtttggctattccaagaccttttctagtcttgtgaatttaattactgaattctgggatcttaagtctctttatcagttgagtctcctcctttgtggtcttacagcaaagatgactgttggccaaactttggatttctgagactgatttcagtgaattgcattatacatatttttaactagcttatattaaatgagagaaagtgcaaggaaggaattgcaaccacaatttaaatagttttttccgtgccattctattccgtgagcacctgccttggagtaggtgtgaaacgggagtcaggaagtctgtgcatgcctctcagagggtggtatcttcgtcttctgagtatgattccgtaccatgaatatgttggttgtggatttttcttttctgtacaacatgaggcccctaaacataaggaaactacttcctttggtgcttaacctaagaagcatctattctaatgatggaggaaaacctagctgtattacacatactgaaagtgatatagtgggttacaaagtgacaggtaaatatttgtgttccatttaagtggtttgtgagtataattttgatttttcctaactgttgctttctctaatgattttagaaccggataacccctcccctttcccctactctccaagcataggatagagctcatctataaaattcattggattttgtgtttttgctcttctagttggtctctgaaatggtcagaatggagttggaaatgggacagcctattagtccaatctacttctaaggctcctgaacagcctcacaagactccatgcatcccagcatcccttgggacctgggtgattagtttgtgatcaacagattgtactctcagaaaacgtgcaagccaccagcctctcgttcaaactgtttataggccccagaaggggcttcctttgggccagatgattagtcacattttgtttcaaacacccgaggaaaggtacagcagctttctacttgaatgcatgcttttaccacctaaaggcaattggttgggagaagatttgggagaagacattgacagtgtccagcagtccttttatctgttataaagctaaatgcatgtttatcaagttttcagcaaagatatatgttccactttagcctccttattcttattttccacttagaggtagagactgggtctcaccatgttgcccaggctggtcttcaactcctgggctcaggctcaagtgatcctccgacctcggcctcctgaagtgctgggattacaggcatgagccactgtgtctggccacaatacacacttgactgtcatttataaactcaaatgactcagctatcaagatgccaaattggattttagagagcctcctcctaggcacctgatactttcatgcttggcttattgtacgaggtaactccactttctgttcatctcaaaagtgttgggaagtgtttgcaggttaccttcctagcacctgcccaaccttctagagaagtggagaaacctgtgaggaaagcagcacaggcgttgccacttagggacagtttcatggaaagagatctctacttcttgatgtcacattaccctttagaattccagaatcacttcagatcttcaaagcttttaataagcagcgatggccttttacaattattttttaaagcagcaatacttaaaattttattaagtgctgtcgtagaaacttgtgtctacaaaagacagataaaaacaagtgttgatgaggatagagaaaaattggagccctcatacattactagtgaggatgtaaaatagtgcagccactctggaaaatagtgtagaagaccctttttaaaagttaaatatagaattaccctaaaaagcacaggcttttgttgactttccctgggggtcaggtgggctcaccttggtgcatcctcccctggggggctctggtgtgggaagccagctttcctaccattctgcatgcagccttgtactgggtccttggggaaagagaaagactgtgaaatagatgtttcccttttcccagaaataccaacccaagatccccagcagtgaccccttatggaattctgggaagaactaaagagataacagtattctttcctgccttttatcaactctggatggcaggagggactctggggcttgggactggctgccctcaggagttcatggcctagtactgatgccaaggggcagaaatttgtgagaaagaaggcctcctccaggagctgttggtatgagcccctaatgggatcatgatatcctacatatgcaactatgggaagaagaaaggatctagccaacatctgttattatattttaaaaagtaatttaatttgtttacattacttgtcattattgtcacccacttatatttgattattctttaagcacatatagaaagatgaggtttatgttgatttttctggtattacatttccctaggctacatctccatatagagctttccttttttaaaatctgttctttattttttatagagacagggtcttgctatgttgcccaagccagtctcaaacttctggcctcaagtgatcctccagcctcagcctccaaaagctctggaattacaggcaagagccactgtgcccaacctccccatatagaattttctatagcaatcttgtcctaggaaatatcatagaaatagtttaggttttaaaaagaagggctgtatgtcatctaaactcttatttaacctatggttgacagccttgctattaaaaaaagatcttaagttgttttacattttatagtctttttaaaaaaagatgatgagacatctctttagtggttgccatgtttaatattgttactttctaagaacaaatataatttttgtgagaacattatattactctgaaacagagaacagtactctctgtccttttagtccctcaatttttgataaggtaaaataagattatcttatatgactagtgtatactaccttatatttgtatgacactccatgtttttcaatgactttcttccagagtttttgttgaaacacaaaaggatttgtacccaaactgactttactttcaattctggataatagataattattattgcattacaacttttaaaaataattaagaaatcagcttagaaaatgcttgatgatttttacttagcatggtacgtctttagggaaaagaccgtattatgaatttagcaagcaagttgagcatggtgacatccgcctgtaatcccagctacttgagaggcggaggggggaggatcacttgggcctgggagttccagactacagtgagttatgaagggacccactgcactgcagcctgggcaacagagcaagaccctgcaaataaataaataaataaataaataaataaatgtcgtggtttttttttaatttagcaagtaaagtagcagaatatcctatgttggattagtcagtggaaaaaaatatctttcaaatcgcatttgatgtttgctcaccattattatgaactaagctactccatggaactagagcatagctgtcaagtaattatgaagcgcccatgctagggaccgcatgccatttaatgagtttacatcagtaaaaagagaggacagattcaaaaatgggacatgtcacacatacatgtgagaattttcccataggccaaagggcctctttcttggttttgatatcaggcaccaactctaataggatgaagctatctgtgtagcttgatgaagtagaaattcattggagtggccgggcacagtggctcacacctgtaatcccagtactttgggaggctgaggcgagcggatcatgaggtgaggagatcaagaccatcctggctagtacagtgaaaccccatctctactaaaaatacaaaaaattagccgggcatggtggcaggtgcctgtagtcgcagctacttgggaggctgaggcaggagaatggtgtgaacctgggaggcagagctcacagtgagccgagatcgcgccacggcactccagcctgggccacagagcgaggctccgtctaaaaaaaaaaaaaaaaaaaaagaaacaaattcattggagtaccttagcattatgggatatctctaggcagcgccaggtttcttgtcttcatagctaagatagatgttaaaggaaggggaacctttttctatcccatttttctagtggcctttataggacttggcttaatatttttattttattttatattattaaattaatatatttttattttataaaataaaaatattaagccaagtcctatgaaggccagcagattttattttatatatataaattttttaaaatatgaaataaatatataatacatatataaatatatttttaaaatatgtaatatacatatatgtatgtgtacacacagtgtgtgtacacttgttatattattacttatcctagtatattaatggctatataacatagctgtgtcccaaatacatgtaatacatattacttttcatctcatttaaacctcacgagagttctttggtgaagatatgattaccattttacagatgagaaaacctgagaagaatagaagttaagtagcatgccaagcttacccaactagctctcattcattcattcatgattcatgaagtatttatcaaacaactactatatactgtcattaaagatacaaaaaggatcaaacataatccttgccttcaaagaagccacagtctaaggttaacaagtggactggagcggaatttggttttatcatttcaaaggcaaaggaacccagattggagagttttctggcaactgccttaggactttttggccaagattaatgtaatatataaaggtaagcatcaatgtgttggtgggaagaagtatcctagaaatgttttttgttttttactgtatctaggactcttatgaactactaattcattattaagttatttgatgacacagattattgttcaagaatttcctcccagagcaattgataaatatcaaataatttttatgatgagcagttccagaaagggttaaagttagcttctctgggacatatgatgggaaagtagctgaacatgatttcaaagggattttttaggagaaaattccaattaacagagaagtaatttccctttctagcttactaagccctatttcagactaatgcagtttcaagatcatctcccttctccccttatttcaacagatattttgaatatgaaaatcttatgtcaaaacttagctgaagccttcatcaggcttttgaaaggctaagtaagaattctgtttctaggaataaaaagatttggatcagaaagattctttgctggctagagttccttttcggatggtagttcaagcagtctttaatcatatttttgttgattatttattagtttccctgggaaatcaaagactcagtaacgtaaaatgtgttttccttaagatattttatgaatcagaacccacagtaaagaaataatgggaaatacatttcctttgctgatatggactaattgagaattaaaatccctttctctagtcattatcccacatggaaatgctgaatgacccaactggcccaattgcaccaaccacagtttctgcctagacaaaactcttatgccactagtagataaagagagagctttctcagtaaatcaaaactgcagagaactagaactaatttaagtgaaaggataggctccaagcccgctgtttgggtaaacccacactgaaccaagtgagcgattgatgaaacttaatatatgtgtattccagtcatcagcctggagtatgtgtaatgcaagcccatggtgtttgtcactgtgagaaatggaaaggcagaccttcattctcaactgtgtggggctgctagcctgtggcagctttggtcaacatcgggcttgcttttgggtgagccagactttggctggtttcctgatggaggttaggggaattgtgaaatgtgtctccttacacagatcgtcctgatcaaatgaaataaaaaggtattttaaaaataatttgcttagtgaaatacaaaggaaataggatgcatttcatactattaaggccgatatggttttgggggatacgaggtgtacatacgtgaaaaatttgaaaacaattcagagtgaaaaagaatggtcgtataacctaatgtaaatgacgagttaatgggtgcggcacaccagcatggcacatgtatacatatgtaacaaacctgcacattgtgtacatgtaccctaaaacttaaagtataatttaaaaaataaaagaaaaaacaaaaaagaatggtcgtgtagtagagacagtggtgaagagcaggactctggagccaggtgttctgagttcagagcccactctgccacttactagatctgagacctggaggaagttatttgccctttccctgtttggctcttttgtaaaatggaaatataagagtacccacctcctaaggtgggcttatgaattaatagatataaaggtatgtaaaattattgctatcattagttactgttattaatagatcagaagtcacaagctccaatgcctgcagtgcccatgcataccaaaacagggatcactggcaacagagacatggccccagtggcgtggagataaaagaaagtggtagggacagtggcagacagccatcaccctactccccattgattgtgaccctaagggaatgctggtcctgtgtcgccagagcttctggtattgccaaagaagcttgaaatctggacttggtcaaaaaatctctcaacttgtaaaggtggttgctttattttaaattactctacaagccaaataaaacactgtctccaggctattggccaccagtgaatgacctctttggactaacaattaaactcagctatggaaattcatctgattactttattgtcacactgtgaaacagggattcattgtcattccagaaacagccattgagtccctgcttgtgtccacccctgtgctggtgcaaaggatgtgcccaagaatcaggcagacaatccaaagaagccacctgctcctttacaagttgttgacaattaagaaacacctagcacttaatagattctccataaatgtaggttccaactccttccattacctttgatacgtctagacctgatccagtgagtatttgagggccaatctcagtttctaagtaggaatagtgatattgttgaaaactaatgaacccaccgacaacatcacagaaatactcctatacttcttcaatgtgagtttcctgctttttgtgtcatttatcatccccttttatttgatgtctctactcaggacttaggactcgggctgtgatattgtgtatgttacctcacaattttttttctgttttttttttctttaagtgtataagcttcgtttatacttccaaaggatcttcaatggaactctacttctgtgagctaaaccagtgtcatactgcaatgaaaactgcaggtgataaacattgtctaaataaaatttccaaaaagtatttgaccaagaaataccttccccctgcattccccacttaatgcatcttaatatgccaagttactgatattgtttgacctatttggggaaatgctggcttgccaaattattgcccttgttaggaactacagtttcttgtaatttcttacccactccggcatccacacaggtatcttccaaagctcagactttattttcaagaggtctatctgagaccagtctgggtaaccaagtgagaccctgtctccacaaataataataataataataataataataataataataataataataataataataaattagctggatgtggtggcatgtgcctgtagtcccagctacttgggaggctgaggtaggaggtttgtttggtctcaggagttcgaggttgcagtgagctatgatcatgcctttgcactccagcctgagtgacagaaaaagaccctgtcccccccccaaaaaaaaagtctagcaacttgagtgtggcagtggccaacttgatggtaactaacaatgggattgcaaactctttgaggaaaggaactgtcatcctgaactcggcatagcaccaagcactgggttgttacatggtgggtgttaagcaaatgccatggaatgcaacagacccctttttctgctgctgtaaactgtggtgtttgaacctagtagtgaatggcccaaggaaaaaaatactgcaggaaatatagtaatagatgaatttggataaagggtatatgagtgttttggagtattattcttacaacttctctgcaagtttaaaatgataatctaaattttaaaaacttattttccgttcatcaaactactcttaaaatgtgtaaaactatacctgaatttaaaagcaacaaaactcatattgcaagtcttggcaaactgagagataggagcagaaaacaatggtggatgcctataaacggatcaagaaaagggagtgagaatttactggaaagaaggacaaatgagcatcgaattcagcaggtttgggtttttccagagatcagtgcctgatactggttcccagatgatatctcccaagagcccggttcccagggtgtgttccagcctctgtccgccaggcttcccaccaagtcttgtgccaatagtagttgccagcacattctgcctcacaagttgctggctccaccactactaccctatcccacctacgtccaagatacgcatctggcttttctgctttgaattcagcaagtcatctcctttcctgtcatgtaactccctctgtgactcggcctacccagccacactcctcagtgctttgtggcaaaactcaacctgaccccccttcagagaaagagaaataagtgtcggggttgaaggttcagctgtaaagtgatgtttcccatactcataaacttacatagcaatgaggaactggagtctatttttgactgttgtagtgacctttgtgcataccctaaaagacagaggaacattgagctaatgtagccatcccatgaagcctcagtagctctaataggtccttttagttgttgctagggtgccagttcttgcactttaatacaattcttggctgggcaccatggctcacgactgtaatcccagcactttgggaggccaaggcaggaggatcactggaggccaggagttcaagaccaccctgggcaacatagcaagacctcatctctgcaaggtaaaaaaattaactgagtgtggtggttcatgcctataatcccagctactcaggcgatgggaggatcccttaagcccaggagttggagactgcagttagccaagattgcgccactaccctccagcctgggtgacagagcaagactctgcctcaaaaaccgaccagccaaacaaacaaacaaaaaatgcaatttctcccatcctaactcttcatattagtaaatcttcaataaaatgtatatgggaaatcaatatggcaccctcaaacctagttgtaatagtcaggagaagaccattctagcctttaaaatcagtcctgttaaaaaaaaaatcagtcctattgacatcaacgtttttacctccagttcctctccacccttctctacctcctgatttcatgtaggcgagcaatttaggacaatgagagtcacaggattttaaataacttaattcctaggtgtgtttggtacggaaacaaagataaccctgttcaacagtgaatttgtgcccctgggtgaacggccaggtgttctttcaactgaactgtgagactaatttcttcctggcctctggaaaccagctgaagcagtgggccagctggtctatcttcaatcttgcataccaacatctttctctgattcacagatttcctttatccccagcacttcctctggtatgtgcatccccgaaagtaagtgatatctattattggatttgggcgttttaaaatcattagccttctggaggggaggggagaggaaggaggctggatggttacattagaatatttccagagggaacctcactttaatctcatccacctctgacttctgcaccccagataacccccatatttgggagggatgacatcacagtaactgacaatggaattatcaccattgctctttttaatatttaaatgatacacagactcagagaaaacaaaatgagtttacatatagtcataatatccataactagagatataaaacaaaaagctatggagattcttatctagtgaagaaatctcttttagaaagtttctgatgactttcagttgcaaagcatagctctttcacaatatatcaacccactttcaatgatttgagatttggagagggcccagccatagatttacctggtgagtcacagagtagaacttgatatgagaaagcaggaccctatatctatcagcctaatggttctcagaataccaggtcatatccatcatttcttttcccaaatagctgtaacaggcatacctcgttttactgggcttcactttcttgtgttttggagatggtatgtctttacaaactgaaagtttgtagaaacctgcattgagtaagtctaccagtgccattttttcaacaacatgtgctcacttcgtgtctctgtcacattttagtaattcttgcaatctttcaaaagtatttattaagataaaaaacaaaagaaacgatataaaaataaagagaaaaaggaagaaaatttgttattattatacctgtcatagtgacctgtgatccgtgatctttcatattactattgtaattgttttggggcacaatgaccctcatccatataagatggtgaacataataaatgttgtgtgtgttctgagtgatccaccaacctgccattccttcatctctctccctctcctcaggcttccctattccttgagacacaacagtattgaaattaattaataaagttatagcgtcctccaagtgttcaagtgaaaggaagagttgcacatctctcactgtaattcaaaagctagaaatgattaagcttagtgaggaaggcatatcaaaagcaaagacagtctgaaaaccaagacttttgtgccaaatagccaagttgtgaatgcagagagaaagatcctgcaccaaattaaaatgtgactccagtgaacacatgaatgataagaaagggaaaaacagccttgctgatacggagagagtttgagtggtctggatagaagatcaaaccagccacaacattccctaatgtttgtaagccaaagcctaatccagagcaaagccctaaatcttcaattctatgaaggctgagagaagtgagaaactgcagaagaaaagttgaaaggtagcagaggatggttcatgagatttaagaaaagaaactgtctccataacataagtgcaagatgaagcagcaagtgctgatacagaggctgcagcaagctatccagaagatctagctaaggtcattgatgaaatggttgcaccaaacagcagattttcaatgtagacaaccttctattggaagaagatgccatgtagcatttttatagctagaggagaagtcaatgcctgacctcaaagcttcacaggacaggcttactctctttttaggggctaatatagctggtaactttaagtcgaagctattgctcatttaccgttctgaaaatcctagggcacttaagaattatgctaaatctattctgcctgtgctctataaatggaacaacaaagcctgaatgatagcacatctgtttatagtatggtttactgaatattttaagcccattgttgagacctccttctcagaaaaaaaaaaaaagattcctttcaaaatatcagtgctcattgacaatgcatgtggtcacccaagagctctgatggagataaatgagattaatgttgttttcatgcctgctaacacaacacccattctacagcccatgggtcaaggagtaatttctgctgttaagccctattatttaagaaacacattttgtaaagctatagctggcattcctctgataaatctgggaaggataattgaaaaccttctgggaaggattcaccattctagacactgttaagaaaattcatgattcatgggaggaagtcaaaatatcagcattaacaggagtttgggagaagttgattccaaccctcacggatgactttgaggggcttaagacttcagtggaggaagttactgcagatgcggtggaaatagcaaaagaactagactcgtaaatggagcctgaagatgtgattgaattgcataatctcatgatcaaacttaacagataagtagttgcttcttatggatcagcaaagtgtttttttttttttttgagatagaatctactcttggtgaagatactgtgaacaatgttggaataataacaaaggatgttgaatcttacataaaccgagttgatgaagcagtagcaaggtttgagaggattgactccaattttgcaagaagtaaaattgtgagtaaaatgctatcaaacagcattgcatgctacagagaaatctgtcatgaaaggaagagtcaactgttgcagccaccttcattgtcttattttaagaaattgccacaaccagcccagccttcaacaaccaccaccccaatccatcagcagccatcactgttaaggcaaaacaattgtgacttgctaaaggctcagataattgttagcattttttagcaatcgagtatttttaagtatgtacatcgttttttacactatattgtagtctgctatgcatgcaatagcattatgtctaaaaaacataatttttatatgcactgggaagccaaaaaattcacgtgagctactttattgctatatttattgtggtggtctggaactgaacctgcaatattgtcaatgtgtgcctgtataagattctccatgcactaaaaaggacatttgaaagtcatgagtaagttgtagaggaactctggtgacttgaagcttgtttacttttagcagtgtgtacctgttgacacttctagtataatttatattctttctctcatgagtattttacaggaaatgcgttttcctttgctagtgatatatgcactttggttttcaggaagctgtggtgctttggttgaagctctctgtctgttttagagaaaagacttacaatgacctcctgatatagtttggatatttgtctgctccaaatctcatattgaaatttgatccccaattttagaggtaggatatagtgagaggtgtgtgggttatggaggcagatccctcatggacaacttggttctgtcctctgggtaatgagtgacttctcactctattagtttttgtgagagctgacttttgaaaagagcctggcaccttcctcccctctctctctcttgcttcctttctctctctccgtgtgatgcctgcttctctttgccttccaccatgagtggaagcttcctgaggccctcagcagaagctgatgctggtgtcctgtttcttgtacagcttgtagaactgtgagccaaataaacttctttttttataaattacccagcctcgggtgttccttcatagcaaggcagacagtctaggacaccccccaaatgtgagctgcaccataaggcaaactgggaaacctcctttagttttgcatatgtgagaattttgattgactgaaccaaggaatcaccctcctaactccactgcagaaggccattctcatgtcatttgcacacgtttagcttgcctgaagtgtgttctataaaatgcacccagattttcaggcatttaaaattattattattttaaatctcctactttctctctctctctctttttttttttttttttttttttgagatggggtcttgccctgtcatccagtctggagtgcagtagtgcaatcacagctcgcttcagcctccaactcctagccccaagcaatcctcctgcctcagcctctcaagtagctaggactataggtacacaccactgcacctggctaattaaattttttttttctttttagagacatggtctcactctaggtcttgcctaggctgttctcaaactcctggcctcaaaagatcctcctgcctcagcttcctaaagtgctgggattgcaggcatgagccaccatgcccagttgcatgttttaatggagagagatgtcctgggcatttgaactgcagattcccttaaactggacattgtcagctatttatgtattacaaaaacaattgtgtttcatgtaaagtattaaacatcaacattacgtcaccacaagggtgattacagcaaccttcactcctaagtgtgcgtcacctacacaaacagagttgtttgtctgcagcattgttttcatttggtaacaattgtaagagttgaagtagcaccttaaggagtaattttcagaggtgaagcaatcagttttcaaaagtgaactccttatagttaataactaaccaataaaaaaataaagctatctccatggcacaaatgcccatggcacaaatgcccatggcaaaaggaaataagacgagtcgttttaaaaggtagctttgaaaaacaaaaaaggatttaaaattcaaagactttgggaaaattcaacttaaccaataacatgagtaacgactattactatttcctgagtccttaccatatgccaaataccgttgtacattgtacctgcttcacataaattatttcatctcattctcacaacattctgtgaagcgcgggtactttattatctatccctgtttgccagataaggaagctgagacttcatacagtgacttacaagttcggacagcctccagcaaacacaggaaacaggattcgaacccatgcagtctgcctcagagccaaagcccttggccatttttctatcctgccttccacagatcatttctgcctacagcagaggtcagaaactgacaaccggctggccttacctagccttaggtaacagtaatggctattgaacacttactatgtgtcaggattattttacacacattcatgtgttccttcatttaatcttcaaagcaactccatgaggtaggtggcagttattatccccattttacagatgagaaaactgagaccaagaggaagtaacacttcccaaatgttagcagaactaacatccaaatccagactgtctcattccagaatcccctcctcttcaccattatgctaaaaatacagttgtctgccaacatgacaaacctggatgtttccccagaaaatgaaggcttctgacttgtcatgaaaaaaaaaaaaaaaaaaaaaaactggaagacttgtcctcttggaccgagcaacagtcacttgtaacaatgggcagctgcccattttagatgaggtatctcctacctagttgctaccacccctcatttaggctgctttgctctttgattgccggtctgaactttggggacattctattttgcagtctcagtctaaggtatccttaatactggatctgcctcacttaacaagctaaatgtctgtgtgttttatgttttttattgtagcacaagttgtttaatgttctctaaaaagcattccccacaaatagcagtaaatgcctctttcctattttcttccctgtcccttgccccgaaagtaaggcagctctgcagaactagtatttgtgcccaacgaagtgggaagatatgaggctgatagccttttctctctcttcttggttggtggcactctggtagtgcttggttagcgataatggagcatctcatggctttgttatgtgtcatagtaggctattgtgtgacatagagacacctggcttttgtacacgccagagcaaaattcaactacaacatccagaattgaagagaaggatattggcaggtacatgcctccttctcaaaccagagatttatatatttaaaaagggcttttctaagaactcaatcttgattatttgttccatgttgggccaaaccagtgcattattgggaagataatgagtggcattcacccaagggtaatcctttcagggattttgatgatgcagtaaatcatgagtgtaaagcctgagtggtttatgccattaaaacctcaagatagaattagacttgtaatcaccacttgcccatgttttgtcatttatgataattatagtagtaataatccatgtattgttgagaagtagcagtcagaagcatccatcaattttttatcgacaccaaatcaagttgatacttcatctttgctgcagaaatgtagattgaaccaattagtctaaagaaattgggcagtcattaacaatgaagcaagcagttaatctacagaacatttctggcccctctgatgccaacaattcctcttaattatgtggaatatcatgagcttctttgggactctgtcaacagtgccattgttggcttacattagaaggagcatctatgtccctgcttttatttaaaagaatgcagtgccttccagcccccaccttgcactcttaggcgcttctaggcaaatgtattctgaagcagaacacttgaatcaaagcacttcgcattttctttcttatttagaaataagaattttccccaatgggcttctttcggtgatggcacgttagctcaccatcccatatgtgttaactatttttgttcaccttacccaaatcatggaataatcatctccttttaaaaaaggaaagaaaagaaaagtcagagtttaaaagaaaaatccaactatttgtgaagaaatcctggtgctaatgagctttctgcatctgcctcaagtcttttccccaggctagcccagtctccctctctagacattttcaatcagcctcgcccgcaaattgtactaagcagctgaataatgcagggtagaaatttcaaatataaatattatttcctatttaggaaatttggaaaagaaagcaggaaaaaaataactcaccccctggtcccccaccatgacactacctctgtgaacattttggtagatattctttgggctctgacacgtacacacatgttgacttttatcatcatcatcatcatcatcattattctagtactctctttttcactttgctaaagtttgaatcatcttttgtaatggatgcgtaatactctaccaaatatagagtatgtatttgtccatgttttgaattatttccctaggagagcttacccaaggtaaaatacttggtcaaaatttataagcctcttcatagctcttggtacatactgacaaactctctccaaaaggatggtaccaatttttaaaatctcaccagtaatatatgcagatactggtttgatgttattgagatttaaattcagttgtgttggcatggttatagcttagatagatagatgatagatagatagatagatagatagatacatacatacatacatacatacatacatacatacatacattcattcatgtgtttgtgtgtgtgtatgtgtgtgttactcctccttaatggacaaatggtgatatggattggctgtgtccccacccaaatctcatcttgaattatagttcccataatccccacgtgtgatgggagagacccagtgggaggtaattgaatcatgggggtggttcccccatgctagtctcgtgatagtgagtaaattctcatgagatctgatggttttataaggggcttccccctttactgggttctcattcttctgcttcctgctgtcatgtgaagaagaatgtgtttgcttccccttctgccatgattgtaagtttcctgaggcctcccaagtcctgtggaactgagtcaattaaacctctttcctttataatttacccagttttggccgttctctatagcactgtgagaatggactaatacaatgggcacagtatcaaattgtaccctgactcaaattactgtaaacaatgccagttgttatctcacatcacaggaagttcggaaataggacagctgtaggtgtgatatgatcataggcccaatgatgcgattggagacttgagttcttttcttcagtttctgccatcatcaccaccctcatgctggcctcctttgggcttcaaatgcctacagtagctccaggcaccacatccagatgtagaaacaacagagatagaaggaaatcaattcttcttgtgtctccttcttaagagtgaggagatccttcctagaagctcccaactgaaacccctaaaccaagactggcaagggaaatggaagcaccattatcgactgattaactaagatttactcccaatctggcaatggagtcaacttcctttgagtgctgaatacctgaataaaatagattctgttaacaaggaagaaggtgggaatggttgttgaggcaccaacagtgcctcccataggcatcatgatttttttatgcctctgccatactcatagaaccatatacatttctttagtaacagttgatgcatttaatgggcatatgcaaaagttgttggcatatctaccaagtactgggctttgtccaatgtggaaggtcctcccaggtagtgatcatcctccacaattcctttacattttcctaaaaacctatctcagtgttgggcccttcaggtagaaaccaggaacacctcggtttctagattcctttggcatataggtttcctatgggaaagaaataggagagctggctttcctctttgagaatcttctgtttggtggagatttgacatccaggataccattgttaggacttccactgagatgaaagtttacagcctgatgaaacaagtctcactttccactttgaattactcaggctctgtgcatctctttccactgcacagcgtagcattttgaacacttcactactcattagcacctccagtgagagatcagaaaagaaggtggctgggaggggaggattgaagaatgcagattagtcaaattgttttttgttttatctagttagagaaacagctgaaattactgcctcaaaaaaatttggaaaattatctggcttatagtttatttctatagttattttcccactaattgtaaaaattaggagtattacattttagagtaaaataataaataaacaataacaaaaaatggctacaacagaagaaaacatgttcctggattgaagaaaccaacctagaaattatactgtatgcctcagaaatttaatactattttgtctttcctgtatgcagttggattatagagtacagatattgtctctttattaatgcatgatttataaatattatttgacactagggatatcaaagtgattgtggatcaaagctgcccatcccttcaccctggtagatgagaacacaaaatatatccatttcctatacaccatgaagacattgcttccagtaggttttcttgctggagacaaaaagaaaaacagaagcacctactgtacttgtgcactttctgttttacagtttcataaggatttttacaacataagtacatgctctatgatattacatacctttccaccacttatataatcaagtgcaattatactgactgcttgaatagatgatgggaaaaatgacttgaatcaaaaattacacaacagaacgctgtttcagaaaggcttttggagtgtacgtgccacagaccccaaaaagagatggatcaagatgattataatagccttgaattttcctaggttggttgagtgtggtggctcatgcctgtaatcccagcactttgaaaggctgaggcaggcggattacttgaggtcaggagttcgagtccagcctggccaacatggcgaaacttcatctctactaacaatacaaaaattagctgggcatggtggcacatgcctgtaatcccagctacttgggaggctgagcaggagaatcccttgaatctgggagacagaggttgcagtgagtcaagatggcaccactgtactccagcttgggcaacagagtgagactttgtctcaaaaaaagaaaaaaaaagaattttcctaggttatggcaccaagaataacttgtaccattttggaagattcatcttttttcccacataacacaatgtagcatgtagtatatgtgacacataccatagctacctgtgcaggagcttggtgagttctggttttgtctttcttcccctcaatttctatcccttcttttctttgtgcttcttccactctcctctttctattcttctaccatcctcatcttttcatttagaggcttggagaagagcttaaaacaataggtgatggggagaaatgtagtttcttcatgcaacataatttccccctgcagtaatccatggatcaacacatttgagggcagctggtttagaagaggcccttacaattgtcttaacttactcctcagagggtaggctgggtgtatagcctacatggctatacatggccatgtaggccatgtaggccattagattacatggcctttacaaggaatttttgggtggttttattgtttgtttgtttgtttgtttgtttttgagacagagtctccctctgtcacccaggcaggagtgcagtgtcgcaatctcggctcactgcaacctccgcctcctgggttcaagcaattctcctgcctcagcctcctgagtagctgggactacaggagcacactatcacacccagccaatttttgtatttttagtggagacaggatttccccatgttggtcaggctggtctcgaactcctgacctcatgatccgcctgccttggcctcccaaagtgccaagattacaggtgtgagccaccgcgcctggcttgggtggtgtgattcttatgtaggagaaaaaagaggaacataaatgcagaacacaattatgcaaaattaggagcctttaaaatgaaatatgatattgtaggtagtttcttcaaaacaacatactagttttttatacttgtttattcatcactgaaaacaaaacatatggaaaaggcaatttttctcccagccaaccccttttcctcggatattttttcaagaaaaattttacagcagatgttttcaaatagatttctatttatttgtgggctaccattatatcagtaggatttctctagaacctttccatcacttcacctgagttttctttatcggaagaaaaaaacaaaaaaacaaaaagaaatgtctgatcacctgccctaagtctacagttgagagcagttttggggactagtaagtcatgttctcttaaggacagcgtctcctaggtgagcggctcgtagtccatatggagcaaattagacagtgaaagaatggtgctgctactgtttctgattggttacggtagtattaaaaaagaacaacaaccgacttgcccagctctgaagaagaaagatggataaaatgctctttgaacacactagtcttttttttttaatgtctgtacagaagggttgcatttatatttggctttccagacctgtctcttgaccttctaattactttatttgaaacagcagtgagggtataataaacctggaggttgtctctcctttgctttatcataaattaaagctgctggtttgttgaggtgaaagtggaggctgaatgttcattactgctcaagtgacggcttgtcaatagcagtgctttttagtttgttctagtcagcacttgctgtgcattttgttggaccactgggaaataaatacaacaagattatacatttggaataccacaagagttcacaaaaaaaaccacaaatgataaattatacacttggtagaaagtgacatgctatcttgtgctattaacaaccaaagataattgcaacgaattgtaattgcagtttgcaacttacagtacagtgtgtccaacatcaatcttaatagtgaacaaagcaatttatattaaaacttaattcacttggtaactttccgctgtatacacgggagctaacagatgtagcttttcagaaagttcaaaggcatttgaaacgtggagagaaatgctaatgcagtaagccttggagaaatattgcattactacttgtaatgaaaacaaatgtatgtcattatctcctagtttgtgtttatttaataaaatatgcagtttgcacattggtgaattcagtgtttctgaatggatatggaataatgttctgttcagaatcaaaggccaaacaggactagcaattacgcatcttctgtaaatagtctgctgtagcatgcaccttgatgcttgagtgggttttgtatgaggtgtaacagcaaaccggggtaactttattcatgactttccttagattggatgtctttgaagcaagaaagggagatctcctggaattacttaagagaacaagcatatttgttttgtgagcttgactgatggccggtagagcagttgagtgaaatctctaaactgattagggctttcgttcaaataatcttctaccgttttcattaatttattccttaatgctattttgctgctcttctaccaaggataataatctcacactcgctgacctccatgagtggatgacctggagctcataactaatcttatttactcttctgaccagcccaacttcatttaccttgactggataaagagccttccgttgctaagcctccgttccttcgtagcattctcgttaatctacagtgaagggggaacgatgggctttcccaatcaagatcccaaagcatgctggggcactgggaacttcgtgcgatttctcttcctttcttgaaaacatgtttccactttattgttccccctttttgatttgaaaataatagagaaaaatgggggagtgggacttcaccatggtcccactctcctaatacagctatttttaccttgaaagttaatttccagccattgaccataggaatgtgtgggttaatttaggtattgttgttgagtacatgaaattttgtatcatgcttttttatttaatgctacattgtttcctgtgttgcttcataattttataattatgcattttaaagactgataatgcgttgtttatatactattttgggtttaattgttccccagtattgaagttaggttacttctacttagttatgctattaggaataatgctgcaataaaaatctctgttttcttcaattagatggtttctcttgaatataatattacaaatggaattattaagtaaaaggtataagtgtttgtatggcttttactatacattaccaaaaaaatgtctaggctgtttttctgtttgtttgttttttgttttttgagacagtctcactctgtcaccaggctggagtgcagaggcactatctcggctcactgcaacctctgcctcccaggttcaagagattctcctgcctcaacctcccaagtagctgggattacaggtgcacaccaccacgcccagctaatttttttttttgtatttttagtagagacggggtctcaccatattggccaggctggtctcgaactcctgaccttgtgatctgcctgcctcagcctcccaaagtgctgggattacaggtgtgagtcaccgcgcccggccttggctggttttatgttagtttgtattgccaccagcgatagagaagtatataattttatcacagtagctttgagaattatcctgactcttccacttacaaactacatggcattgggcaaattacttaaccattctccctcggttttcccatctgaataaagggaataatagcaatgcttaactcataggttattataggtattatattagtttatatatttaaatatcagggagtagtgtctgccacaaaggaaacactccataaaggtaagctgttattattcccaaaatttaatttttcacccagtttaatattaccttctatttaagctgcagtttttagagtaaatgttttaatagtccattgaagctaactagtcaatagattttataatcagtaacttctgtatttaatgaaaaatttaaatcacttaggcaataagccattaagaagaacttctcagtaagaaatgttcagtctgtaaggtagaggcttttagaaattccatctcttaatttataataaaacagcttttattccagaatcatctaaatgggtcttgaatccttaatgaaagtctgaaggagtttagtctggatctcatacctgctcctccattaggggaggccagagccccttgatgacagtcccactaagactgcacactataaggggaagaaatttcccagacgaaattggagcactgttaatactagaagatagagaaatggaggctggacagctaaaaatcacaaaggtacaccaaacttcttaaagaccttattactacagtattctcaacactagtgattgggaaaacaactaaatgattgtagacaccttgaagtatttgggtcacccagtaaccactgcctatgacatttatcctagagataaatgttacttatttttggccaggtgtggtggctcacacctataatcccagcactttgggaggccaagggaggagggtcacttgaggtcaggagttcaagaccagcctggccaacatggtgaaatcttgtctctactgaaaacacaaaaattagctaggcttggtgacgcgtgcttgtaatctcagctacttgggaggctgaggtgggaggattacttcaactgggaggcaggggttgcagtgagtgaccgtgccactgcattccaacctgggtgatagaatgagactccatctcaaaaaaaaaggtggctgggcgcggtggctcgcgcctgtaatcccagcactttgggaggccaagacaggcggatcacctgaggtcagaagtttgacaccagcctggccaccatggtgaaaccctgtctctactaaaaatacaaaaattatccgggcatgggggcgggtgcctgtaatcccacctactctggaggctgaggcaggagaattgcttgaacccgggagatggtggttgcagtgagctgagatcacgccactgcactcaacctgggcaacagagcaaggctctggctcaaagaaaaaaaaattacttatttttattagtcagcacaacattgagaactcatataattaggcattttgctggagaaatggctcatgtttggctgcaaatatcaaagaccagaaaaacggtaacttaaacaatatcaggatttattttccttcatctgaaagaagttcacaaagaacagggttattctggtggctccacaacatcaccaatgttcatggcccctttggtcttgaggttctgctatactttgacttggcttctggcttcaggtttccctcacggtcacaaaagaactgctgtggctcctaatggctcacctacattacaggtaggaagaaggaagaaagggagggaagggtataatgtgcctggcagctgagccaaaccccaacccctttttaaggaacttccccagaagccttgcccaacaatctctacctagactccattacctaaaacctaatcacttagtttcatctataggtaagggaaaactgagaagtgcttttcagctgggtacattgctgctctcaacaaaatcaggcctgtgtgagagagtagaaagggaagaatggatgttaggaaggcaacctgcagtttctggcacaactcccttgtgtgaaggagacagtcttcagctctgtgaactctcctggcagcccttgatgttggccagtattatagacgagaagccaggagagtcataatgaagcacttcctggggcagagaaaaaagtaagtggagtgaatgatgaaaactttaggtcattaaataaagttccaacattttcttcttgcccaaaacattcacaacaaactctgtggagtaggaattgaaggaaaatgtgccatgccatttttctttagcctttttgcaatgcaacgcacaatcaatacaaatctttgcagtaatcatatattgattttcctagaatataactccatttaaagcacttttatccccaagagtagaaacattggaggctatcaaaggaggaagtagatttccttgaccccatctgcagtgcacaattgattaacaggatagttatgagagtgtgagagagagacagagagagagaagagagaagtcaccgaaaggttaataccagctaaagagaaacatgattataggacattaggctttttgtaaaatcataaggtcaggataagataatgataccatctaaaattacacaagattttgagtacttagtatcctctgactgccccagcaacccaacccaaaccccaacaagcatagctgaatttttggggttggcaaagccatgaatggaatgataggtttaggttcaggccccatgagctggcttgataagggaatgagtaatactgattcgatttatcctgagtcatagctgtgtactaaactaaaactttagcatacatcacatcgaatgtttctttgcttcagacaaagcgaaaagaaaaaaggacattaggaaccctcatttttattccttttcttaggaaagttaaacacttcctttcttctactttccctcttccctatcactttactccctaaagatttaaaaaaaaaaatctgctttctgaaaatcccatgagtttaggtctgctgggtatttctatgcacagatgtcttcatcccagagacaagaagagtaattggatggtaagttgcaaaaagcatgcaagttctgctctgcctctggcctgagtaactgggatgtagccaaaatggagaatggtaccccctgaagcaatcgtgagttaatgtctcttacatactccttgctgaaaaggcagagagtgtactcttgtttatagtgtattgttctcactgtatttctctccctaagtccctcttgtttttttgtatcaagactgagttctcacaaacaagctctttattaaattaaatggttcatgtagcctcattatccttctcaatgtgcaatacttgatagtttattttactagcaacttctggagtttgtgtttttttttgttttggggggctttttttaaattttggcttcgggcaaagcaactagtacacattgttagataaagtatcttatctgtcagcagcacccttgtgaattaatcataattcaataggattactaatcaagatttgagatgaatgttttgatagagctatcagatttgtctaatctgtcattagttgacagtcgctgcaggcagagtgaaaacttggcaatagtagacctgtttctgatccctttggcttggcccaccagttgggtagcttcactgattatagcagtggacccaggcattgcaactaattaagttctgtttctcactctccaggatcctccctcctcctctcaccgttttcagaatatgttgggtggagttcagctctcatgaacctgcccatgtaatgaacagatttggtaacaaggtgttccttttggtcattttcacttgataacaaagatgtgccaagccaagtgacaaatctcaagggtgatatggtgtcacttgcaaaaagtggtcaaagaaaaaagagaaacttaatctgttgttaaacgatactaccgattacaactctttccatgtcactaaaatctgtgtcccattttaccaagttgtacattcttggaagtaatttatagcatatcttgcacatttattcagtttgattagataaatgaaagctagtgatgtagattggtattttattgtatacactatatacagtatttaaaattatattaaattttgaaataataataaattatactctgcatattatgtagtactcattaatacaaagatgggatcattttatagaggagtcctttaccaatttttcttcctctctctacattgttattagtataaagatatttcttcattatagaaaacttggaaaattctagaaaagtctaaaaaattttaatttatcataatcttgtcatctcagaatgatcaatattaacattgtatcatcctattaaaattaaataacagcacaaataccttaattagtaattgcttgacagtattgtcaataaaatatgattctacctggcatggtgtcctggaatctgtaggcaacacaaaggaatccagaaagatcgtactttctctcaaggcttcactttctacatgaaaaccatatgggaaaactcatttaggctgttagtgtatcccatatgttagaagtgacaactttttaatttcacaagcatgtcacaggcctcactaaatgaatgctagccacactgagagatttgtagcttggatgatttagacaagggatagttgagagttacctaattagactccaggtgtaattatgtaaggcgttccaggcagcagtgtgctgtgtgttaattaactttcatgctgaacatgcagtagcccctgaacaaagaacagttcatggaggaagaaaagcttccttactttgccctagctttagttattctcctactaaagttaacctctcacactcccccttttttctagttgagagatgggccataaacacaagccactttgcaaagtgttcattagtccctgtaactctcttcctaccgtcttccatttccttaaaacattctttggaaagatcttttaaaaaataagaggtgtatgtatttatttatgtacaactctgttactggttttaaaaatccaagtgacttctaatcctgatttttttgctgcccattaaactccacaagtatctttctgtggtgacggggagaatgatatttactgaactacaagattagctaatatcccatcaataactgagtgccacagacttcctcagttcatcccattcctgtctctaggtagcaacagtgagaaaagcacttattaaagaatattttttcttctactaaattagtccatgacttcatttgtgctggtctctgtttgtcaactgctgccaaaaatttttaactcatgcagtaaagtaagcttcgtaaatctatataattcaactcaacacttgcatgagaaaatatttcaggtaaccagttaagccctgtgtatggatggtaactgattgattgtccagtcctctcccagttctcaagtgagaaaatcccatttcgaggttctctcttcctcctaatcctgtcaccttgacatctgcaggctttagttttctactaataacgtctagaatgacacacaggaccaccttgttcatatggaagataaataatagttctagaattctgtctacaatagcatgaaattaacgtagattaaggatttgcctgaaacgttaagaacagataggattcaacatttttttcttctagtacctcttaccaattatgagaaagaaactacttactaaaacagtcttgatttttattgtctgttggaagaaaggtaaaataaggacttcgttgtataaaaagcattatctggcagcccttatagctatatgggaaatgcctcaaagagatgcatcctagtgaagatgaggaacatttggacaatttgagtgttctctttcagttggataattttcagttggatatctagcaaaacttagtcctcatttttttttgtttgtttttcctctgatatgcaatgtagactacatcaggcctttatagtcaaaaccagaccaaccagttttgaccaagcacttcctctcttcaaggctatgtttagtgcatcaggaatcgaaagacatctaagacataaaccctatccccagagagtatactatctgttagggaagattagacattaaaaacatgaaaagtaaaactctaataaaggatttaaagaacagttcaagataacagtaggaaagatatgccacatgacaatacatgattgtcaaatgcatttacagattccctttagaacaaaaactgttcttgaatccttctaatagaaggggttcgtagagaccattatgaagccttaaaatattaagaaactgaagtattattccataagaatgcctttcaatttagaaatttcaatgcaaaggagaaatctggtttatgtaactggtaaagtcattattttaggttatcactgaattgaaagtgtaaaatgtgaaaattcttatataaccagtagatctctgagaaagtgccagtggacaaccccacagagccaggagaggtaatcaaatcatttcttttagcaagttccaaatatgatgaggttgttttaagctacatacataagatcttagggaaaaaatggattttttagttgtctaaatgacactgcaatttgttacagcccaacggatacttcttgcttgctgcacagaaaagccaatgcactgaaacagtggtgttgcggcagaaaaacagtttaataatctcaggaccagctaagtgaggagatgggagatatttctcatatttgccttcccaagaatttggaagctagggttattaaggaaatttggtgggcttggggctagggaatggatactgctgattgggtggagatgaaatagcacgggcgtcaaaactgtctttgtgcctgagtcagtttctgggtggggcttacagagctggtgagtcagttccttggtgtgggtcacagatctgggtggcatcgttggctcatcagaatgcaaagtctgaaaaatacctcaaacaccagtcttaggttttatgatactgatgttttctatgaagcaatgggagaagttacaaatctgtgaccatgagctatgtgactcctaagctgtaagcaattatagaaaagcaaagcaaagcaaagcaagttatgaaacaataactggttatgatttaactatgcccataccttagcaaaccttaagtccttatcacaattctaaccttgtgggcttttactaatttttttaaggtggttttataagacatgggcagacagatggaaagaggtcattccagttaggtagaattccatatgagagtgggaataaggtagtgtacagtaggtttagtgtgttaagctatctggctgaaacagaaaattcaggaaacttagaccaatatatgggaggcatcaaaagatggctccattctgggaagccttcaaaggtttccgaggctaacagtgacatgatgctggtgatattacaggcagattagtctagtgggcagtgtctacaatggatttgagttgttcttgcttgaggcaaagggatgtacctagagaaaagcattgttcctgaaatgaggtgatgtaagcatgcatctgacagagcagttataatagaaaagacgtgaatttcagaggacttctaagttgacagaactttgtaatcaattggtttggaggatgaagaagaggaacgagccaagagtgattctctgatatcaaacccagaaacaagtggacatttggaggctccaaaaccaatttgagtatgggaagaggttttaaagatacagccatgtaaattagctattgggaagacctaaagtgcacaacattcttctggctgtgaaaattatgaaattattccccaaaggactacttagatcattatgtctgctcagtcatctgaaatatattgatatccaaagtacacatccagtaattaaaaggaaaaagaatccaaacagtttgttgattttgatattttgttatgggttagtaattgccttgactatcttcttgcagagcttgtagttaaaggcttgcttatttcttcatcaagtaacagctgaatttcttctttcttcctattgatatagtttagatacttgtccccctaaatctcatgctgaagtatggtccccattgttggaggtagggtttggtgggaggtgtttgggtcctggggatggatccctcatggcttggtgctgtccatgatctcatggacagtgagtggggtctcacaaaatctggttgtttaaaagtgtggcatctccctcccctccactcgatctctcttgtgcctgctctggccatgtgacataaccgctcctgcttcaccttctgccatgagcaaaagctctctgaggcctccccagaagccaagcatattccagtatcaagcctcctgtccagcctgcagaaccatgagtcaattaaacctcttttctttataaattacccagtctcaagtattcctttatagcaatgcaagaatgttctcacacacctatttaggttaaaaggttttcttatcatcttggttttcagaaatggacaaattgccaagggcctgtcaattctggactgacattttttcacctgcttgaagagatactgttttctcttaagaactagtgattttcttcagttgtgtgactgacttacataatactagcagaattggccacttagtgtccaacagagaaatgaagttgagactgtggggctgggaagtctctggggcaatagcttcaggtttgaaaagtgaggagaaatgaagcaaaaaaataaaaacactgtaccttttgtcaaaccctttgcttagatcaaggaatctagatttggccaaaaggttgaatttaatgcatacagttgtgtggtataaatttgtctttgtaaaggtcagacttgtccagacacagtggttcatgcctgtaatctcagcactttgggaggctgacacaggaggacccttgaggccagaagttcaagaccagcctgggcaatataacgagaccctgcctctacaaaaaagagacaacttaacagggtgtggtggttcatgcctgtaataccagctatatgggaggctgaggtaggagtattgcttaagcccaaaagttcaaggctgcagggaactatgatcatgccatgtactccaggctgggccaccgagcaagacccagtctcttaaaataaataaataaagctcagattcatcccattccagggaatagggaaagttccacattgatcagaactgagtcctgtaagctccaaacaatatgactcgcctttaaagtccttctgacgatacctttccaagtgtctgacttatgatgtgttccttgttgtatagacttgtacgtacctgggctatgtaagtatcacttctgagggtacaggtaggagggttgctgcgagggcccactgtcacttcgggaaagtgtagcagtacttgccaaatttaaaagccattgaaacaactgaaaataaaaattaaaggtggttatttcccccattactgaaaggtatatgtgaaatcttgcatttacttttttttaaatagactttaaacattgattttcctttctctgggaaggcagatgtttgtgtaaccaggaaagaaagctgctctcaacagcagttttctaataaaaggcctacttgcttttccattttaaaaccagtgtttaagagctttatgattctaaaatgaaaagaattcccttgctatacaaggaaaaggaagagtgatggaatatttttgcaagaaaaacgtaccttaatttgccaccttacaagtagcctgttggcatgagtacattggaatgaggaagcttttattaggaaataatcatttccagttctgttatagtcattatcccaaaagtttcccaaattctgtgtacagtagtgtgtcctggaacctgtttagtcacacgtggggaatgaactgagcttttgagaccaataggatggtgtgaacataagaccaggtaatagagctgttctcctagtagttttagggtcttaaaaggggtcattaatgctttcaagtcacaaaacaatctttaaagttctggaactatactttcctacaatcatatttcacatttgcacataagttagcttgaatgaatgtttaataaaaagctggctacattcacaatgttgcgcaaaaataaaataaaaaattaaagctggtctctgtaactacttatatgaggttctcagcccccactgacagtgtgtgttttagggaaggaagcacattgagtcactagcaaaacataattgggaaagtgcatcccttccaaactaatgatgtatggtcactactctaaataaataggggttgggattatccattttgataacctgttttgtgtgctgtaactgttcagtttagaaaatacagagttgattccaaatttttcctgctggtttgaaagaattcatacatctttcaaagtgtgactgatattcagcaaggaagtgccttactagttgaacaggatctgatttgtcattcttgtttttgctgtaaagcaaaatctacttttagttaaatcagtaatttacaggtatataaactaaagcatcaagaaaacagcaaagaagttttttccaagatcattcacatccagaaatgaaatgaaacccctacgaggctccttcttcattttgatggggccattgtggttctggcccctcagtttggttgagggcaacatgcggagtatctcagctgaacacagatccttcatttgatgtcctgtctaaacgtgacttcacaaagatcttttagtcagacactggatagcagaactcctcccctgggagaaaaggtctttaaggtattttgaggggaggagaagggttaagaggtctaatccataactctaaatccccatgcttggaggaactcattgacattgtcggttttaagggctcctttggagccattatggtgtgtcacgctgagacccactggagaacacttaattgtagatcattgtcccagtgtgtttcaaggccttttcagggttttgacaaagcagcctcctccgccacttacgggaaaccttgggaaagtttcgatactgacaaacccaagaatattcttcaggtttgtgcttttaaattaaataactagaattatcagaggtttttctgtcttcctttcacccgcttcctcttgaaatgaaacctcaactggacatagaccccctggctgctggatatgtgttggctacatttctttccttttctaatttctttggttttgaggtcgggattttgtttttgttggtggcagaggtggtataatgagcaaacacagttatcacatgcagagcctgtaagctttgatttcaaaatgtaatcgaaatcacatcatttcatgtggaaccaatttctccttgcctccttcccctgaggagtgaaggaaatatctctggtatatcgttaaatacctgatagattagaccttcagataggttggtggattaaggcaaagcacaaaaaaagctcatgttttcaactgtctatcctattttaaggttcctattggccctcagtattctgaatttaccacattagtcctaatctaatatttagccccataatgttttaaacattttgaccagactcagttcccagcttccatgttgcctatctctgttaacatctctgcatgcatacgagggtgttcattacggctggattgagggaaaaccaccaaaaaaccaattcccatttcttgggcctgggaatccggggccctaacagtgagctcagaatgaattgagagaatccctctgggtcataaagatagactgcagggtcaaaactcaaaaccttgaggttctttttgcttaaaattccaaactcaatcaaaaatgagttcatttctaaaaatgctgcaatgccttctcatggtttttccacactgtaaaacagaagttaaactctagggtcagaaatagttaacaaagagagcctttgtgctaagcaggagtctgtggattgagttctggctcagccagtatatttctgtgtcatttggctttttataagctcattgcctcagtttctcttccataaatggaggcaataatattattgcatttctatcttctaaaattaccaagaggtatagatgtgtagtaatacagaggacacttatgaagactgttaactgtgagtcctttttgctatgtgagatataccagtaaaataagggacatgattgttttggtaggcctctgtacggatacaggatagctcattgaacccgatctcaggaattatagattagaaagttgtcagtctttgatttctgcatctccccgtgtgtccacttgctcccctctttcagcaaaccaactgccactgtatctttgggccacgtgaccaaaaagatggttaccaatgggttttgagttttcatgtctcaggtccaacaacctgggtagagacagaatctctttaggatctcaattccagattcccagggagagaattctgattgtttcacccacttctggaactaacagctgtggctagggagttcaggccaccccgagcgagcatggctgcctggaacctgctacttaaatcatatgcatattggggaggtcagttcccaaaaatggagaatgtggcacacatccaatgtatttccactggaccactcctttaaagagtaagttgaagtacccagagttctttgtattcctcagaagaaagttgctttaaggaataaacataaaactttaaagcaggaagggatttaaagttcacccaactctaccctccttgtcacgttgatgaaactaaggcaaatgaaagagattagttttccagaggtcctaaagctacttaatagcatccagtgctcatgcttttagttaagagcatctagtgtatcttttattcagttttcttctgccatctcacagttgtgcgtatttcagatgtcattttttcctattgcctagacgtgtttcaattataagagatttatatttatagtctctcatttaataggtggtttaaattttatagactcttctactttagaaaaacatagatagtatttacaaagacaacatagaaacatggagaaatgcatatgatataccattacatggaaaaagcaaatgaatgcttatatatagtcattatgttaaaaaatatgtaaaaattacgtatgcatatatcaactaggcttgttagaatagtagtattacgtgtaactttaaattttccttaacaccatcattaaattattttagcagttaattttagaaaacatatttaatacaaatacaccctacactacttctcatcttagagctacctgaacctgtatacctaatgttcttgtgcaggaaggtgaactttctctaatgtaagccatatatattttgggcacagctggaacctttattccggcagtgaacacattgaaaatggagtcctcatagctgtggctaaagctgcattaaattatgatcttagtagagacttggccccagacaggatgacccactagaggcaataatcagaggataagatgttttcaagcatgagtagagtcagactctaggagctgggaagaaccttacctcctgtaacctgacccttgtgggcttcagaactggcagtggaagcatagaacgtttccagtgtttagaggtggaacttggctaaagtacagagagaggactctcagtgaagttccttctgctgccatagcagctgcattgtgattatgcccaacctggaaagtgcctcccccaccttcccaggagcctcactgtctacctctgatggccaaagctggggagaaaatcagtgtctcagataccatctgctatggtttggatgtgtgtcccctccaaattgcatgttgaaatgtgacccccattgttggagggaggcctagtggaggctgtttgggtcatctgggtggatccctcatgaatggcttcacactgtccttgcagtaatgagtgagttctcactctattagttcatgagagagcttgttgtttaaagagcctggcacctctcccctctctctcttgttccctctttcgccatgggacatgcctgtaccctcttcgccttctgccataagtaaaagcttcctgcggcctcatcagaagccaagtagatgctggtgccatgtttgtacagcctgtagaaccataagccaaattaacctcttttctttgtaaactatccagtctcaggtattcctttataacaacacaaaataaactaatacatcatctgactttgaatctgccctcatgtaaatacatctgttcacatgtaaagcaagacagggacacaagagcagccagcagggcttgtaggggcaggagcaacccgagaggtgggcggcctcctgttaacactgctttctttttctccttgaaaaaggcaaactgggttttcaaggagaatgagaatttcagggaagggatcagagagagtgggcactacatgtgccacatctgtcagatgtcttcaaaccattaactcccagaccccaggaagctgctgctctttctagcattttctagagcatctagcagagcactaagtggtagtggcttaatgatataatgttttgtgaactttgatgaggagggagattttctcaagagcaacttcagaggtgcctatacttctctgtttcagagtggatatagaggggtggaagaaggaggccaagatactttgctttctgcaagaagctatagagatcaagaaggaaacatagggatggaggtaggatttctacctatgaagagttatcaagcatttaagtcctatagggcccatgtggcccattcattcattgaccagtttattcatccactgatgtttttcattcaacagactactactaagcatcttcgactatgctaagtcctgagcagacagtgaagaactagaaagacatggccccgccctcatgaagattacaagttaggcctattctccacacttgttctaactcaatctgctacatataccttgagtacccagtatgcgttaggtactaaaaggagctacaaagatgaaccagacacagtcttcaagaacttcagggatcagggaaggtttatcctgattgtaatccctccagaggttttgatcatttctctaatcacttattaggcctcttgcttcctgtaggaatttgttctctatattagattgaaatctgcctgttctaatttcaacttcctttcttctggccctggctagtcctcagtgtacagaattgccattggtacctgctggtcaaggccaagtgttgtgagccaaggtttctaaccttggctgcagttacacttaactgctcctctccgaagctggatttagcagagatttgatggaagccctgcaaacctcgattcaaatcaaagttcaaacctagtgactggttgagtgaactgctttaataataacagtgcaaaaattgaatttaaaataatccttttagggatgcaagatgcagtggtttagccttttattaatattcttttctttccactaataaagattttaagtcaacatctccttaaatttgattaattccattaggatcactccaaaaaaaggtttatcagtggctttgaaatccaaatgggatgaagaaaaaatcatttatatggcaaaatctcagttacactaactagattaaagaccttctgctgaattaaagaaaaaatcaacacacagattatttgaaacaaatgtaaatatgcaacttttaagcacatagagaaatctaccctaaagttgatgttttttcaagttctcttggagcttacattccagtgggagaaacccgtgttaaacaaatacatagaagacaatttcagattgtgagctaggaaatcagggtagaggaatgggtaatattagagagatcagggaggcttctctgagaggtgacatttgagctgagatctgaaagaccaagccacagtcacatgaagacatggagttagcgttacatgcaaagcaaacggttaagtgcaaagtccctgaggctggaatgggcttaatgtcgtggagaaacaggaagagagtggaggagtgatgcgagatgagaatagtcagagaggaaggtagggccataggaagaagttttgatttttattccaagcacagagaatactttagaaagctaaacactgacttttaaaagccatcaacaaaggaaaaatatgcctaaggtgtgtgttttatatgggaccgaagaagaaaataccgaggcttctccccattttattcttccacattgagtgtacagctattagtaaaatgaaatattatttgcaaaaatgctttgaaaatgttaaagcactattctccttaaatttaagaatattgtcctggaaagatttaaaatgactaagggtactattactttatcacagaagaatcatgctgtgttagtccattctcacaatgctgtaaagatgctatctgagactgagtaatttacaaaggaaagaggtttaactgagtcacagttcctcatggtggggacgcctcaggaaacttacatcatggtggaaggcgaagggaaagcaagacggcaggagagggagcacagggggaaaccaccacttttaaaccatcagatctcgtgagaactccctcattatcacgagaacagcatgggggaaaccgcctccatgatccaatcacctcccaccactcccctcccttgacacctggggattacaattccagatgagatttgggtggagacacagagccaaaccatatcacatgttaaactttaagcaaactctccctagtagacccacctagcgattcaaagaaatacatggctatgaggattccgttgccattttccttatctcatataggtctaaggaaggaagatttccactgtttagaccggaagaccctgaggacagtatcctttctggctgccctgctgtcatatgagtccatagggggcaaaggtgaggctttcctgggcttgtgattcccaggatgtctccacttctagggccacattagctaaatggtaattatgaaaatatccagggcaagaagctaataaataagaactgacaggcattgcatagtaaagaattgttgtgcacgctggctcttctgcaagacacacgatggaggttgagagtgtctaacaatcctcctgaaacgtgctgcccgatgtgctgatgatacaaaaggaaacctgctcgaatagaagagcacgggagaagatttatgtcctgcggatggctgttcctattgtcgtggatccctgggatgtttctgagagctttcttgtgaccttcggtttctaaatgtagaacctggctgtgatctctgggaaagagaaaggaatatgtcctaggtttgtccaatggtatcaggaataaagaagctaagatttggaggagccaagatggccgaataggaacagctccggtctacagctcccagcgtgagtgacgcagaagacgggtgatttctgcatttccatctgaggtaccgggttcatctcactagggagtgccagacagtgggcgcaggccagtgtgtgtgcgcaccgtgcgcgagccgaagcagggcgaggcattgccttacctgggaagcgcaaggggtcagggagttccctttccgagtcaaagaaaggggtgacggacgcacctggaaaatcgggtcactcccacccgaatattgcgcttttcagaccggcttaagaaacggcgcaccacgagactatatcccacacctggctcagagggtcctacgcccacggaatctcgctgattgctagcacagcagtctgagatcaaactgcaaggcggcaacgaggctgggggaggggcgcccgccattgcccaggcttgcttaggtaaacaaagcagccaggaagcttgaactgggtggagcccaccacagctcaaggaggcctgcctgcctctgtaggctccacctctgggggcagggcacagacaaacaaaaagacagcagtaacctctgcagacttaagtgtccctgtctgacagctttgaagagagcagtggttctcccagcacgcagctggagatctgagaacgggcagactgcctcctcaagtgggtccctgacccctgacccccgagcagcctaactgggaggcaccccccagcaggggcacactgacacctcacatggcagggtattccaacagacctgcagctgagggtcctgtctgttacaaggaaaactaacaaccagaaaggacatctacaccgaaaacccatctgtacatcaccatcatcaaagaccaaaagtagataaaaccacaaagatggggaaaaaacagaacagaaaaactggaaactctaaaatgcagagcgcctctcctcctccaaaggaacgcagttcctcaccagcaacagaacaaagctggatggagaatgattttgaagagctgagagaagaaggcttcagacgatcaaattactctgagctacgggaggacattcaaaccaaaggcaaagaagttgaaaactttgaaaaaaatttagaagaatgtataactagaataaccaatacagagaagtgcttaaaggagctgatggagctgaaaaccaaggctcgagaactacgtgaagaatgcagaagcctcaggagccgatgcgatcaactggaagaaagggtatcagcaatggaagatgaaatgaatgaaatgaagcgagaagggaagtttagagacaaaagaataaaaagaaatgagcaaagcctccaagaaatatgggactatgtgaaaagaccaaatctacgtctgattggtgtacctgaaagtgatgtggagaatggaaccaagttggaaaacactctgcaggatattatccaggagaacttccccagtctagcaaggcaggccaacgttcagattcaggaaatacagagaacgccacaaagatactcctcgagaagagcaactccaagacacataattgtcagattcaccaaagttgaaatgaaggaaaaaatgttaagggcagccagagagaaaggtcgggttaccctcaaaggaaagcccatcagactaacagcggatctctcggcagaaaccctacaagccagaagagagtgggggccaatattcaacattcttaaagaaaagaattttcaacccagaatttcatatccagccaaactaagcttcataagtgaaggagaaataaaatactttatagacaagcaaatgctgagagattttgtcaccaccaggcctgccctaaaagagctcctgaaggaagcgctaaacatggaaaggaacaaccggtaccagccgctgcaaaatcatgccaaaatgtaaagaccatcgagactaggaagaaactgcatcaactaacgagcaaaatcaccagctaacatcataatgacaggatcaaattcacacataacaatattaactttaaatataaattgactaaattctgcaattaaaagacacagactggcaagttggataaagagtcaagacccatcagtgtgctgtattcaggaaacccatctcacgtgtagagacacacataggctcaaaataaaaggatggaggaagatctaccaagccaatggaaaacaaaaaaaggcaggggttgcaatcctagtctctgataaaacagactttaaaccaacaaagatcaaaagagacaaagaaggccattacataatggtaaagggatcaattcaacaagaggagctaactatcctaaatatttatgcacccaatacaggagcacccagattcataaagcaagtcctgagtgacctacaaagagacttagactcccacacattaataatgggagactttaacaccccactgtcaacattagacagatcaacgagacagaaagtcaacaaggatacccaggaattgaaatcagctctgcaccaagcagacctaatagacatctacagaactctccaccccaaatcaacagaatatacatttttttcagcaccacaccacacctattccaaaattgaccacatagttggaagtaaagctctcctcagcaaacgtaaaagaacagaaattataacaaactatctctcagaccacagtgcaatcaaactagaactcaggattaagaatctcactcaaagccgctcaactacatggaaactgaacaacctgctcctgaatgactaccgggtacataacgaaatgaaggcagaaataaagatgttctttgaaaccaacgagaacaaagacaccacataacagaatctctgggacgcattcaaagcagtgtgtagagggaaatttatagcaccaaatgcctacaggagaaagcaggaaagatccaaaattgacaccctaacatcacaattaaaagaactagaaaagcaagagcaaacacattcaaaagctagcagaaggcaagaaataactaaaatcagagcagaactgaaggaaatagagacacaaaaaacccttcaaaaaatcaatgaatccaggagctggttttttgaaaggatcaacaaaattgatagaccgctagcaagactaataaagaaaaaaagagagaagaatcaaatagacacaataaaaaatgataaaggggatatcaccactgatcccacagaaatacaaactaccatcagagaatactacaaacacctctacgcaaataaactagaaaatctagaagaaatggatacattcctcgacacatacactctcccaagactaaaccaggaagaagttgaatctctgaatagaccaataacaggctctgaaattgtggcaataatcaatagtttaccaaccaaaaagagtccaggaccagatggattcacagccgaattctaccagaggtacaaggaggaactggtaccattccttctgaaactattccaatcaatagaaaaagagggaatcctccctaactcattttatgaggccagcatcattctgataccaaagccgggcagagacacaaccaaaaaagagaattttagaccaatatccttgatgaacattgatgcaaaaatcctcaataaaatactggcaaaccgaatccagcagcacatcaaaaagcttatccaccatgatcaagtgggcttcatccctgggatgcaaggctggttcaatatacgcaaatcaataaatgtaatccagcatataaacagagccaaagacaaaaaccacatgattatctcaatagatgcagaaaaagcctttgacaaaattcaacaacccttcatgctaaaaactctcaataaattaggtattgatgggaagtatttcaaaataataagagctatctatgacaaacccacagccaatatcatactgaatgggcaaaaactggaagcattccctttgaaaactggcacaagacagggatgccctctctcaccgctcctattcaacatagtgttggaagttctggccagggcaatcaagcaggagaaggaaataaagggtattcagttaggaaaagaggaagtcaaattgtccgtgtttgcagacgacatgattgtttatctagaaaaccccatcgtctcagcccaaaatctccttaagctgataagcaacttcagcaaagtctcaggatacaaaatcaatgtacaaaaatcacaagcattcttatacaccaacaaccgacaaacagagagccaaatcatgagtgaactcccattcacaattgcttcaaagagaataaaatacctaggaatccaacttacaagggatgtgaaggacctcttcaaggagaactacaaaccactgctcaaggaaataaaagaggacacaaacaaatggaagaacattccatgctcatgggtaggaagaatcaatatcgtgaaaatggccatactgcccaaggtaatttacagattcaatgccatccccatcaagctaccaatgactttcttcacagaattggaaaaaactactttaaagttcatatggaaccaaaaaagagcccgcatcgccaagtcaatcctaagccaaaagaacaaagctggaggcatcacactacctgacttcaaactatactacaaggctacagtaaccaaaacagcatggtactggtaccaaaacagagatatagatcaatggaacagaacagagccctcagaaataatgccgcatatctacaactatctgatctttgacaaacctgagaaaaacaagcaatggggaaaggattccctatttaataaatggtgctgggaaaactggctagccatatgtagaaagctgaaactggatcccttccttacaccttatacaaaaatcaattcaagatggattaaagatttaaacgttagacttaaaaccataaaaaccctagaagaaaacctaggcattaccattcaggacataggcgtaggcaaggacttcatgtccaaaacaccaaaagcaatggcaacaaaagccaaaattgacaaatgggatctaattaaactaaagagcttctgcacagcaaaagaaactaccatcagagtgaacaggcaacctacaacatgggagaaaattttcgcaacctactcatctgacaaagggctaatatccagaatctacaatgaactcaaacaaatttacaagaaaaaaacaaacaaccccatcaaaaagtgggcaaaggacatgaacagacacttctcaaaagaagacatttatgcagccaaaaaacacatgaagaaatgctcatcatcactggccatcagagaaatgcaaatcaaaaccactatgagatatcatctcacaccagttagaatggcaatcattaaaaagtcaggaaacaacaggtgctggagaggatgtggagaaataggaacacttttacactgttggtggggctgtaaactagttcaaccattgtggaagtcagtgtggcgattcctcagggatctagaactagaaataccatttgacccagccatcccattactgggtatatacccaaaggactataaatcatgctgctataaagacacatgcacacgtatgtttattgcggcactattcacaatagcaaagacttggaaccaacccaaatgtccaacaatgatagactggattaagaaaatgtggcacatatacaccatggaatactatgcagccataaaaaatgatgagttcatgtcctttgtagggacatggatgaaattggaaaccatcattctcagtaaactatcgcaagaacaaaaaaccaaacaccgcatattctcactcataggtgggaattgaacaatgagatcacatggacacaggaaggagaatatcacactctggggactgtggtggggtcgggggaggggggagggatagcattgggagatatacctaatgctagatgacacgttagtgggtgcagcgcaccagcatggcacatgtatacatatgtaactaacctgcacaatgtgcacatgtaccctaaaacttagagtataataaaaaaaaaaaattaaaaaaaaaaaaaaaagaatttccctaagtcaacaagacaaggtctaataaacttcaggtctaacaaagacttctgctgtttaatgtaaaaaaaaataaaaaataaaaaataaaaaaataaaaatacttgaaaaaaaaaaaaaaaaagaagctaagatttgagttgcttgggtggagtaggtacaagttggtgattaccattcaggttggctgccatctgggtaggtctcccttcatggaaggccccagcagggaagctgtaatcatgtgctcagtgaaggcaaaagtcgttttgatatctttttagtaaatcattccaccaacgctgtgcaagccataaatgtggcacagattaattgagcaaaaaaagtgacttgcatacagttggcacttctgttcttattaggatcagaaagaacaattgggtgaagatcacttcaggaaaaagaaaaaagcatatgttacttattgttttgggtgaatgtttttatggaaacagggatgccacgtcattaataactctggcatgccatcccaattctggtcggcctgatagattaaacatgagccctctctcattattccagcagccgtagagcattgactttgcctccagcctgataagtattccatgcacattcaagcctccgagttgacatcttcttctaaaattgtttggctgtaataaatataaaactttcaccactgatgtaaagcattgctggttggcatcatttcctacccccttttaattattcctgacactgtggagaaacatctaatataaatctgtaatgtgcactgatgacaaactacacggttgaaggaccatgtaatttctccacaattaattaaagtgcatggagattttttttttctctttcattctttctttctttttttccccccagcagccagatgccactgactagctcagataacactgctgtcaactgtaaaaaattaagatccaaaccgtaagaaaggtacttagataaagaaaccagatgccaggttatttgtgatactaccacatacgtcttgatggaagccaccattgttcaacatctgtagttccacagccttaattacgcacttaactcagcaagcctgtcagcagtttatttctacaagtaccgtcacttttgtaaatcttcccttaaaaattgaatgctgccaatcagcacagggaagagagacagagaccctggaagaccttgtgcaaaaagagatggctgcccgtttatgccggtagcacatgctggtgtttatgggcatgtgtgtgtggtcacccagagaggaaaaaatgctctgctaccatttcaggctgatctaccacctggaattgatcaaaagcaaattaattttcattttcaattaggaatacaattaaattcaaagtggtgagggggggaaatggccatgtttacatatagctcctgctggtgggagggcttgaggaaataccagatgaaatgaaatacttgtctttgtatctttgcatttaactcattcaagtgttaaggtggtggctggggctgctgctgctgggactgcagtttacctcccctggagctgcccctccttcccttcaggcagaatgtaggcaaagggaagagggagggcagtcagaaggtggccactctgagatgcccattcatgggctcttttcccaggatttggccgtggatccaagatatgggtgttttcatgtagagcctgaatgaggaagcagtagtttggctttgcattctgctggctctcagcgtcaaagcattacctggcaaacggatccacgtctggccatcatgagagatattgagtgattgtgtgaaaacaatctggctgttgaatgcctcatgtcacaggatcccggcccttttcacttgacttttctctacattcaactgctgccttttgttggagtaactgagtgggggcctgtggggcagacaggattcctcctggctgcctggggaacagttgacccagtgtgttcatcaccaagggtggtaatttggggagctttgaccctgattttaaggaaagtcaattatttgtcaattatgagtcccagaaatcctgatatgggactcagatgttaaaggcccggctctctggtttcgggagagatcacagtggatctgagaatatgaagcggtcatattctcccagagcagtgcatgttgcttgccataagccttctgtcatgctgatgagattcttctaactatccatcttggagatcagcttctttgaaaaagcagagtgggtgataaatatttggtcatatgaataacaatgaagtagcttcagataatagcttacatctttataaaatcctctgggtgatggatgaagaggaagagaaggttctgggtcatggaaacagctgctttgggtgaaagattatccaaagcagggtggtgaccaggaatccttgctgctccagtccatactttacctcctacccacacccccaaccacctttcttgtcctaaagcaagggtttacgtttcctccctgcatggtatttgtgctttaaaagaagattttattacttctgctacagtggaatttctctttttactagacagttggcatgaccgcagcctaaaaccgcaatggagttgttaacacactgggatcagtttttccccctttaaagctattcttttcttttctttatttttttaaagaggaaaaaaatgctccaacaaatcaacagaactattaactttctgatttatttgctagagagagcaaaaaaagtcaatgtgaactgacagaaacgccagaacagacagtatgaaaacattctatgtgaaagtttccaactgaaatcgcaccacaagcagttggttatctggagatagacatcttcaatttcctgattgcataatagaaatgggatttctttttcctctacaaaaagcgttatccataatgttgacataaagttttctgtgccttgagttccaaagagtactcttctcaagaacagcccagcatcttctcaactgctaacggttactgccatttctcctccttcaagggaaagggtaaatgttgctaacatgatgaaggccagaagaagaaatcttcaagagcctgggagattaactctgcccagctggccggtgtcatggcatctagtaaacaggccgatcctccactataaggagaaatagccttgagaaaaattaatctggttatgggttggcaacccaatagctgcctagccagtgcacgtttctccctttgcaagtatctcagggttagaagtgtctaaggatttgagactgtgattctgggaggttcaggacagttgtcctggctgggcctgagccaggctttgccgtggatctgcccacctcaagaactggcacaggtgataggtagtcttcaaatctacatggcatcccaatacagttggtgacaatgcactgtattttcctcccccctcagtttctgaggacccatttctgagatggaaagttcttggccctggcctgtagcttacatcactttggtatttttaaatgcccatgatctcaaaagcagtcctcatattaaaatcaccctttatatcaatacttcattttatgtaacatagtgttttaaaattatatttaaaaggcagcttcttttgtcttatgtgcccttggctaggaaacaaaggaagtctcttttaagaggtgttttacattttatgactactgagagagaacatagttctttaataggtagatatctaagagagtttcacattataggttttcagagattagaagttctggaacaaggttgtttgataacatctctgaagggcaaaggagcaaacggaaacctcagaggactggatgccaaaacagaacactctctagacttgtgggcaacaggagcttttctgagatcgtattattctcaccgataatagcatcctgccttgactgagggtgagggtgtgcaagatggatcattcgtgtcttatacttcatggttatgggcatgtaatatgttcttcattgagccaggcaattgacagagacgccagtgcatttaagacttgagtctactggaaatgagacttgctctcttgccagaaatggatgcttttctgtgtccaccactatcagacatcttgacttttttttaatcctgactcttaaaacaataatatcaaacaactcgagggggaaaaagttaaatatttccatatgaagagctgattaaatttgtatggttttcttttcagtaaaaattgatatgtgatgaaacacagtgcagctggatggctggtttgggttgatgctgtcacatcctctgatctcgctacccagctgtaagggccagcacccggtgagctgccatgctgctcagaatgcccattcccaggcactaaacaccaatcactgattacctggctgaagtctttcctcttaagtctcatcgttcttctgtgtgccttccttttcaagggcaggctgagtccatgtggagcattatggttgataggcatgtgatgcccatctaaaatacggataataagaggaaagggcttctcaattattggtgtggatatgagaacttgactttttttttttgagacagggtctcgctctgttgcccacgttggagtgcagtggcactacctctgtctcctgggttcaagagattctcctgcctcagcctcctgagtagctgggactacagatgcatgccaccacacccagctaatttttgtatttttttagtagagacagggtttcaccctgttggccaggctggtctcgaactcttgacctcaggagatccacccacctcagcctcccaaagtgctgggattacaggtgtgagccactgcacccggccaagaacgtgacttttgattttcccagtatttggagtgggtgggctgcttctgctgttgccattggtggccaaaggtaacaacagtatattttgctgtagcagattttacagagatgaaaccatcttgccacttctattcttaataactgtgtccatctttcctctctgcagagatgaaattgccaaagagtcagaagctcctccaggcttagccagctttcacctttgctcatcatacatctatggggctcctcttaactcacagatgggctagcgcctgttttcagcctttatcctgatccttcgtatctccatgcccgctccatgtctctctctccaatgtctcttatctctgtcttgcttaactgggaccagttcttccccctccctctttcagtttccaaagatcatctcctgccagatcttggcctaaagttaacttgattctctggcctcgcttacagaagccgaactgctctaaaccacctttggtggcagtgactccttcctgaatgaggtcaggcactcgaaaaattgataggcgacactcactctggggcttctcacatatattcctcagtcgggaatggtaaaggtccccccattcagggacttcaattttgtgacagagaaaaagacaaatttgactgtcaacatttgttgggctccaaggaagttacacgtgtaactgagctatttcagatctctatttgtcaagcccagtgttcactgtgggtttccttacatccctcccctgcccaaacccctgccttcgagaaacagtctacaaaaaaagcatttaccctctgaggattgctttgtaattaaaattttacaaatgccaaataaacaagggcatttttgaaatgtaaatttgtcatttttcgtaagcaacttaaatcaactccacctgccttgagactggtttctccttcagcacaaagccacgtgctcctaggttctcttttggctcctgcagctccgattccccgtgcacttagatcctggtgtcggttttttttttccttgaacactttctgcagtttagttatttgttgtaattatcaagttcatttttctctaatagatgtgattaagtatatttagcactgtgtaatgagttttctgcctggttgcatcttagctaataaggaattccttagcggcaactctgacagctgctacgagtcccaggtctgcgctgccacaagagactccttccatgaactgctagcattagagaaattaactccattacactaaccataaaattgaggctgaaatttgattactaatagatcctcaattcaactagaaactgtagaaacggggtggtgccagtggggaggaaggtgaacgcgtgtgaaatgccagcatccacattttcatcagtgtgtgtgttcaccacacttccaatttatttcctgggcaggaaggagagaatagagccaagctgatggaattaaaactgcgtgattcagccggtataagactggaaatctttgttactgccatgatggtaataccttgttattagtgcctctgtcttcgctgagctgagaaacctcccggtgtgtttttggccatcaaaactacttgccattgtcaccggtagtccagatttgtaaggctaaagtgctgaggacaattagtaattggtgactggctgctatgatgtatagttgcttagcaacggtgcctgaattaagtctctggaagtggcatacaggaagagacaagacaggaagatgaaataggtaccatttcaatgtgtaggtgagtcagtaatgaaaaaggagtgaaagatatttgtaatcatagagacggctgagtggaaaattggggctaaaggaaagaaaaggcggaacttagttcctctcttgcgaagtaaaataagagtaaatggcagttgaatcaccccattgatacaagagctcattctctttctttgacactatactgtgaacccaatgctagctgaactcagggtgcattatttacccaaaaggcagcatgaaaattcatggaaggaagagatggagaatgaagttgcactggcttgaagtctttagaacaagattaatttagcttccgttagttcataccagcgaactaggattaagtgggcgacagggcccaggtttgattcagccctgcttgcaatactgggtggaactggtgctctgatatactgatgttcagtcttgctctgtttggagtagagaagtatcttgaagaggccacgaacagcatattcatttcattagacttggctgttttgagactctgagcagactaagatatcaccctgaactacatgatttagtgagctggtttagcctctggaaggccagatgagcaaaagaaagtggaaaagcagtacaagaccttgatccagatactgagccttgttaagggactgccttatctatggcaacgagctatgtctagaggtctgcaaaggtgcaggggctgttttgcaattagtgttgaaacactgagataaagaaaggatatataggaattaaaaagagataacgtaaacactaacaaagagtcttaatcccctcggctgagtgttttgcatgtttacctctgatcagaattcttaataattttgagtgtgttccaactcaataaaaattccctaggaagaaacaagtcgattcttggattaaaaaacaaaacagaaacagaaaaatgtatgcccatgtctattattttaaaaataaaaattaaggaaattaaatgacacaggaaggttttgtttgggtttagtttggttcagcctactcatgggcacaattcagtcccccattatctactgattagcaggatatctttagggctcagaaagcaggttttctgtctctaccgatggcttgttttctggctgaagaatgaaggtgttttgatacaaagttattattgttcaattgagaaagtctttgccctcctggcctgaagttccccactggagagaggaagctgataacaatctctggttctttcctagtacctataaagggctcatcctcacttacaatagagcactgtattttcaggacaatgtataattatttgggaagaagccaaaatgatgactagtgcgtaacaatagcatgcatgatatcacaatctgtctaatggctgatggttccagtttaaatatcttaagctaagggtgctccgtgctctcacattcattcccacagtcccaccactgctgtcccttaggtaagtaacactcaaactctagttgtttaatactcaactttcctgtaactgtaaactctgtgagggcgggggtcatataccttgcttcccactgaccatttattcccagcacccagcacagggtttgtggcccagagggcacccaataaacgttggttgaattaaattgttagaatttccaagatggcccccagtgagccccacttcctgatattcacagccttgtgtaatgccctccctgtcagtgtgggctgacgcttctgatgaattgagtaagggggaataaactaggttacaaaaggcagtgtggccacttatgatctctttctgtctggactactcacgctgggagaagccagttctacattgtgagcaaccctatggagaagcccttaagttgctgaagcctccagccaacagccatgtcgctgattttggaaggcgattttggaagcttatctcccagaccaaatcaagcctcaggtgactgcagccccagctgaaacattgattgcattcttatgagaaaccctaaaaccagagccatcagctcccaaattcctgacccacagaaactgtgaaataataatgtttgttgttttaacctgttcatttttggaggtaatttgttacccggcattaggtaatgaatatactggccaattaccacatgtatcgattcatttatttattcattcagtaggcattgaatgacaactttgccagggactgtgctagatgctagggataccaagacaaataaagcaaggtccctgccttcaaagaactcacagtctaggagagtgagatggacacggagtcagagaacactgaaggttggtttatgagcagcaggcatacaaaggaggaagctggagtggaaggagccgtaaaattgacaaagtggtctctaatataaccctccccagacacacatacaaatacaacactttcttcctaactttcacttagcttagctgtagacagttccagcaaaccttgtttagcactgctccgtgctacattgactccttatggagctggctgaccactgtggaagagagagcactatcctacattctcagcccttggctgtgggcatcccatgatcaacgtgactcagtttgagtgactcttgccagtctgtcagttttctttcctcttccctggtctctctgtcattaacaccctattacctatggatgtcttcattagaagcaaatgttgttttttgttttttgttttgacacggtctcattctgtcgcccaggctggagtgcagtggcacgatctcggctcactgcaacctctgccacccaggttcaagttattctcccacctcagcatcccgagtagctgggactatgggcacgggccaccacgcctggctaattttttttttttctgtatttttggtagagatggggtttcaccatgttgcccagctgggcaaatggttattttttaaatgaccaaaaaaaatgagattattttaatgctttgtatgctcgcccgatatataaatgcaagtttcactgtggcttgagtctgaacatggttggtagatgtgagtcataccctgggcccagctgcgtccaccaacagaatacttctaaggagcaccaggaagataaagacatcagcccaaaacgctctaatatgttgctggtgagcagtaaatcacagtggtaagaacacatctccatggggaccctgctatcatggcccttctcatggctgattctttagaagactcattcccacggcctcttcctgtgggtgacacagtgccctggacatgggtggtactgtgtggttgacatagggcctgaaggtgggtgacagatgttatggaggagaatttattttattttattttttgaggggggagacagagtctcgctctgtcgtcaagactggagttcagtgacacaatctcagcccactgaaacctccgccgcctccagggttcaggtgattctcctgcctcagcctcccaagtagctgggactactggcacacaccaccacgtgtcagtagtcccagctaattttttgtatttttaatagagatggggttttgccatgttggccaggctagtctcgaactcctgacttcaggtgattcacccacctcagcctcccaaagtgctgggattacaggcgtgagccaccacgcctggccggaggagaaactccagcgcagtaaagaaacagccctgctggtactgggtcctttaccctccagagtggggctcaggaagaaggaacaggaccaggtaccaaaagccccagtaatcccgtcaagaggtgcccaggtttagagatgacttcaaggaggaggaaagcctacacactctttttccatctgctgcaggccacagtggcaaagcaataaaatgctgataccatcctcctgcaggtataactgatttaagtggggaaaggcagacaatctgtgagagacaccaaagattacttggcttttccccccacctcctgtgcatgaaccggagaatgatggaacaattggttgtgtttggggcctttatttgcttttttccctcctctctttaaaaaataaataaataaataaaaaatctgcctttgtctgctgctactgtgtctatttttgttgtggtggtggttgttttaaataggagaacttgtgaaatgagactgcataaaagatggacttgttttatatatgggatattgcctgtccttcagatctatgtgtctcgcttatggaatgaaccaaagtaggagagataaactaatattttgtatcagctcagccagacaatacagatgataaagatgtttcatcttcttatgcatgcagaaaatatgaaaaatcgtagtttacacacatttgctcaattcaagtgtaaaattgggcccctcgattgccctgggccacagtggctgtgttaaggaagctcgatttaccttgcagccgagtgaaaaatgatcagaatattagactcatctagcccacattaaggagccattgcatttcccgacaattgtatgctatctcaatatgaaaacagagcaatttcaactcatatcaggttatgatcggcaattacagttgcataattcacctagtcatctctttgcagggcctttattttccctcttggtgacattcctgagaaagtgcctgataaaaatgtcatatatcatcccagctttagaactcgtgagggggtaatctgctatgccttgctgagcccatattcatcactggatttttgacttggaggggtcatggcactcataatttcctgtttgatattgtcctcaccagctctgacaaggggctgtaaaagctcggttgtaggcagtggttaagcgctgctccagtggggcccatcaccagcaataagagtgcattactgtggctcatgctggagttggccgtttcgaagataattagatttgatgtcaacatttctttatcacctgcatccttttgtgcatctgtgtgtcaagttgttctttccggatttattagcaccctcagagctactctctatctgtcagcttgtgtgctgtttgtgttgacagttgtaaagttaattactagtactaatgagcatcgggcttttggtggacatggcgttttggacatttaaaactataattagtttttttttgttttttgttttttgttttctgtgtgtggtgcttcagtacaaaataaaacgtgttttaaaaaaatacgtcccttccattgcattttgacattctgtgtgcagtcaacttatcttttattcaaaggctccaaaaactcagttctgtttctttttaaaacagacttccttttcattgtaactccatgaataatttcttttgttccttacttctcttccaacttgataacgtgaccatttcatatgccttgagaattaaggatagtgatggtggaatgatcaaaaaatgtgctgggtaaatgttcatctctgcccaatcggtggactacaaattttccacttttaactctcctcttttcaaatcgtactctgggttcaaccgaaagactcagtgaatgaagaagattggataaaatgaaaagtgtaataaatcgttctctgagtggctggccccaaaataatagtgatagctcatattggtgtaatgttaactctctgccaagaatcatggtaatctctatatacagattacctcatttaatccttgcaacaaacctaagaggtcaatactattatctccattttacagacggggaaactaaggtttagaaaggtgaagggtctaacaactaggaagtagtgctgggatttgaatccaatcagtgtagctcagagcctgtgctcttaaacactattctatagacacaaagtatgctttcaaggaaaattagcagactcctggggcatgtattctagaacaacaaaaaacaatcacttactaaatcagatcggctcatttgtatttcactcccagccatactgggacgctagtttcagtgtaatggcaattatctatggcatgtactttatggaggtattttgtttggtctattgcggcagcaaagcaccactcccttgctgctattcatatttactttctattcatcattatctgccattttgctaaataactatccttcccagacataaatcatctataaaaaatactctggctcagagaaaatttcgccctggccctgcaatgatgagataaccattttcatctcttgttgaagcattgagatttattggctttcgatgggcaacagaccaggcatcactctctgctaaacagactcccacttgcatttattcttattgcatttagtgattcaaaatggagctctcggaatcccttgagggtccattcccagcctgggtggggtgttattactttatattagataagggaaggacacacaaagaaacatgcggtgattcggatgattttttatttccgtttagcagtgatgacagaatgtcatagtgaaatgacttcaaaagtcatttttccccactgccctggttctgcagccttgtcccttgagggctcttccattgtacagtgttattaattctgctaactttcagacttcattgctgacaacaggcctcttggctttcgcagcctattacattaaatttcccatcaaaccatgtcagcctctgaggtcacagatttcaagagaagctttagatattttgccatctgacttcatgggcaggtgttttctaaattgcttttaggtttgtttttccagtgtcagaaatcagattgaacctgtttaaaaaaactcagacagtgagtgctcatcaggataagaacaaagcggagtttgaggcacgcctgaactggcatgtgtgtttgtgtgtgtgtgtgtgtgtgtgtgtgtacagccgcacgcatgcacttgtgtttcagttgaccttccaaaggcagagcaaagccttccgactcaacttcatccccggccccacctggtgagtacagtgtcttgttgactatctatttttctaatacttaactgaagccccaaaatatagtgtgactgccctggtgaacagagatatgctctactgaccttgactttggagggctctgtgaaactgttgagtagcattagaaggtcactttgggcaggccagtgaaatgacagaggacctggtctagggctagaatgccttaacatggactcctcaagcaagttcctggcggcaataaaatttcagtgtgtcccttgatgcctttattttggtgtgctgttgtgggatcaaaataaaggaaaagcagaaaccttccttccaagtaacatggccacaggcatcacgttgctgtcaaaattacattctgaaggaagcctgcacaggaacgtgcaactggggctccatttaaaaacagaaaagaaatgagatgttatttttgaagcagtcaactcgtggaaatgattacaagtcatttggcaaacccaaagtccccttgaaattcttatttattattagttccggttaatatttctgctctgaaaatgacaacattcaaatcttggcttgccgtgatagttcagattgacaggcttggccgttaacacctttttggtcttctgaactgggtattgtagtgtgcttggcaggggggtgcggcaggaaagtgacagaccttggaagctgaagaggagggaggacccacacgctggcttcctcagtgatgggtatctaagcacttcagtgcctcacctaagagcaggtgacaagagcttggtggcttgcaggaagcactgcagttaactctagccccgccccctttttttctttataatttgtagagacctcggaagctgctgttatctgaacccatcattagccagctctacctgcaggaggagatgctgaaccaggctaggaccagagaaagatgagtgaggcgaggtagtgtcactctgtttcctcctgctagcagccataaggagagagaatcatttgtggcactctggggacagttttgtcaccctgacagtaatgctgttatgcgctggcttgacacacaggatgaatccataaagacagataagtaactgtgaaagtggctggggatcaggctgagtgccaccactcacctgcagtgacaaatagatagtcatgaaggattggaaatcctgcccaacacagagatctgtcagcagagagatggactgcaaccccagtgacacaggcagctggagcaaagtgtgtgtgtgcacacatgcgcccccgaggggtgtgcggggaggttaacttcagagccttgtttccgagagggtgtgtgtggtggtgcaggtgggatgagaagatttcgacacttttcctttatgaagtagaactgtggatgttgtgtctttttgttggtaagttcaggcacatttggtttagaaggctgtgcttactttccgttttccccggaatttttctgataccaataggggtccccatctgcaaatcaaatgaatccaagttatgagagcaaaatactactgctgaactgctgatgttggtggcaccaggcaagggacaagcggaagcaggggggcccttatttatcttttatgctggaaaggcttgttcttcctggctggaaatctgcttttcgtcaatgaaagaaattccaagggaattgtttgaaaaaacaagcacaaggctggaactgctgtttcccacttgggcttgagatccgaacagcgctacgttttacagttttgaaatctgttactgttattatgcagaatagatcatctttgttgtaattatccttgagatcacaaatgccgtatggtgttctattgtctttctgggaagttatgaaatagatttgaggcgaaaagtaaacataagcgataagagtcaaacctcattgggtcactgtcagccatttggacagaagccctaaatggcccagaggcacagccatttagaactcttttcttttttttttttttttcagtagaatattttgacccccagaggtatgcgtagctatatcggggatccaaaggtttcacacaggatgagtcctgtgtctacatgcagcgtagcaggagctgggaatggaagcaaaccaatattccagcatctgcttctagaacagtgatcaggatcgctatcgttaataagatgggtgtatgtgggacccaagactcatctgtcaagcccttcttctgactgcttttaaggtaatatttttaaaaaacaagaaattacaataagcttttttttttcaaatgagtcttcttgtcctattcctttattattttgccacctacctttgtcatcggtggaattgtacttcatctatttcagctttacttatcctgctagttttacttctaggagcttaacgtagggtactggtaattctagaactggttcctgaaaaatggtacatgtagctttaaactattatcaccactgttgctgctgctattactattactacttctacttgagtgctatatatttaaacatttattctttctatgtaggcaagcccttgcaaccagatatttctttccaaagccctggggtctatttgttagctttaagattctttattttagtttatcattttgtgagactaagaatattttaaagcagttcagctgtaatgaaaacattttctttttgaccctgggttctgagtttgacatgttttgaccctatcattctaaccatgatttaaattctgaatttccagaagccttattaaagatgtcaatttgtgcaccagaatggtaaatgttcctgtgaactttgactcctaaaggaaactctattttaaaagaataaaagattttcctgataaatatgttcctcattttgggctaatactttcagtctgaactggggaatggggcagggagagaccattgcctgaccctacttgctccctcattctgtaatccaaagctattttacaacccacagcattcgatttttattttgccaagaacacgttggtaatgggatgtaaatctcccggtgcacacctgattaaacaggcctgtatacgtgaattaaaaaagagggtgagccccttgccatcacggggtgacagggaagcacgccagataaccggagctcagttggctgaagggagctcggtggctgtttttattaacttgagagctaaggtcatgcggcttcttggggccttggtgaggaaatgtaagtgagaggtctttccctggctgcagatctcctcattctgatgtgcaaggatgctcctggaagtggtctggcccccacccgcctgactctggtcacaatggccactgtcaggcaccaaggcacgtaccactgaggctggggacagctgagtgttagcataacattttattttattttattttattttattttattttattttattttattttattttatttattaatgtactgatttttgacctggggtcttgctccatcatccagtctggagtgcagtggtgcaatcatagctcactgcagcctcaaactcctaggcttgagccttcttctgcctccgccttcccagtagctgggactagggactacaggcgcacaccatcacacttagctaatttttaaactttttttaggaatggggtcttactgtgttgcccaggctggtctcgaactcctggactcaagcgttccactcaccttggcctcccaaagagctgtgattgcaggtgtgcaccaccgcatccggcccacagttactcattctgctgacctctgttgctgctctcctgagtatattccggctttgtagtcaggacatcagatactagcatttgtcaataaaaagtgtcaaatgatgtgaacttcctcagtcttaccaccaaaccctacttttcagcgagagtgcttgcagagagaaatttcttctagagggtttggcttgccttgtcactttctggttctccctgtcttcaccagatcaaactattcgcagagaaaaccgggccacctcttggacctttctgggaatggaaaaattattttggtgataagatgtttccagcccactgttagggatcatggcactgtgcccatcaacacttggtattaccccagcctccttggagtcctcgtccccatctccctctgacctgagtaactttgaggaactttagtatatttggaacccgtatgccagcagcactgttggaagctatcaggaggacacctggtaactaactaacttactagctaacttactaacttatacagctcaactaacttatacagcagagctgtttagactagccacttttgcacacagtacttctcttgatcctcctaacccagtgagatgaatgaggtagatattattggtcccgccttgccttggggacactagcatctgaggagttaccactactagtgagtgttgggaccgggattccccatagcatttttgctgtcccaggagactttcatatgcattgttttcctgggtccttacggtagtccatgcagtaggtgagacaggtgatgaagttttggtctgcaaatggggatgctgaaactcagagaggctgactggctttcttggggacatggcagctgacaagtgacacaactggaaacgtatcccagcccttccaacttttagaccgacaccctttcattacacgaggactaactccacaattatgaaaatctcaaaaacaaagctactctgaagtctctatatagctttgcccttcatatgattccaaattcccatgccagtgaagctgcagttccggggaaaatcccgtgaaaggaaagtcttctttggctagctattcagaccaggccagggagggcttagcagtgtgccctacacccagcgcatgtgctcaccagcccattggtattgaaggtgctaacagtctggactcagatcctggcactgcccaccatttgctgactcatgtcccaggcatttgcaaagtgtatgggctgtcatacagaaatagagtggatgtttggaagaagagtatcaggtgtagctcaggaccagtaggaaaggtgtccctgccagtggggacagagagcaaaagcaacgggacaaacattgaaggcacaatactgcactgtagaggcctcccatctctgcagccccagcttggatcacaagggaagttactgcacagccaagtatgctgcatttgcaaaggtcaggctttaattacatgcacagttaaatggaaatactgtagagaggtcacactcatatttctttggctttcattaatgttattgctctgtcactttccctctccttaggtttgtaaatgaaagttcctttagtacatttaaaagcattatttatttttaattgtcttacctctggagggagaggttacttctttttggggtgtttttggttgttgttgttttttttttgttttctttttttgaatagacttaaaaaaaaaaactttgcctatgcatttctggttaatttatttcaaaccttttgctttttatagtcttatctactaatacttttgattaaaacacaagcaaaaaccagccaacatgaacaggttgaatgccacatctgtgcagaagatagcagctcacttatttatggctcagagaaatggagcctaaattaagctagctattgctggagagtggataagcggccattatgaattatccttaattatagcgatttcctaaactaataaacctgctaaatctttattgcaaaggttagtttacgcagtgcatataaaatccgcatgtgctccgcatcagccaccagctgtctgacagtgtgttgctattgcagtgagtgttcacataaattttatgttggttatattaacagtccgtccatatcactacccacagatgccagtagacataaaaattgctctctagtgagcctaaatatccctagaagctagttgtgtctaatgttccatgtagtatttgaacgtgaaagcaccagattggagggttatttacagatgaatatttcaatccacttagttcatataggcctacttagccttctttgctggtttatttgtatgctaaataattcaccaaaggttcttgtttactttctatagtagtttctatgaaatgcaaacaagggagccaagttgaggtgttcaaaaggctaagcagctctgtgtttaaatgcaggtcagagcagcaaatgcagtcttactgacgggctgtcactcagttttacacattcctctctcctctgtctttttttttttcttcctcctccagatataactggggcttgctgctttcataggaatttttggttggactatcttctaaatttgtctttttcaatacctgcctgtgtgctaccttcagcttgcacaattaaccacccaatgccagcagcaaagaacacatccctggctttgagaagcttccccacggtcctctgggctaacaagaacaggtcaatcctcagctcttgaaatgtccttgttgtcttcctttttttcctttctcattttcttatttttcttttctttttctttcatttctctcccatggttttttctagtgcatttccagatctcaagatttgaaaggacagcaaataggacttttttccttgagagccctgagctcgcccagcctctgtcaacctgaaagccagaagggcaaagtctagctctaaaaaatgcagccttgagaagcccttagaatatatgttcacccaggggtgagaaggatcattgttttctggcaaggtaacagttacctggccctattgttcacatgtccccatggctgaggttatgaatgaaaaatacctatctgcccccacattttgcaaaggtttacgatcctaaacatttgcccccaaagagatgggaaaatagcctcctccattttcagccaggcactgccaagatcatgggcgagttcaatagcagtgctaactttttatttaataatattgattttatcatttttactacttacaatggggattggtcggctgatagttatttgacctccctttgtgcatggctgtggagtgcttcgttaaggctattgacatatatctctcttccccactcttcttccagcagcccatctcggcaaataatattgagatgcggtaactgttccctgatattgatttcagattgtgttcatcacacccttctcggggccaggcagagagcagcagccccagttctgcaaatccttgatggctgcaggctgaagtatcgtttccatctttcaagcaagaatatcaaccatatatatttccaaaacattacccaagaaaacgaaagcattttttgatcatgattatttttttacacatacataattaaactgatcgctccagttttatgttgggctttttctgcacttttctttttaaggaatgctagaagatccatgggtccctgagctggtagaaggaactctgattacatttttaagcttcagggattcaggatttggcacactcggccagacccagggcctcgttgaccttcagttctcagccagctggggccgtctgcaccacctgggcctaaaaagttccatgtttggcccctgtggagtcagttgagatggcagggtatttaaaagaaccagaggtttaacattcagggagagcctacctaatctagtgattacaatcagacgtaggaaggacatgatgcagagtttaggtttgcatatttatttaaaacaccaaacaccaagcaaatactaataatattggaaattatacgttccatggggaaaaacaaaaaggcaatagagaatctataccaagagtgattatatctgagcagtagaattgcaggttatttatattttttctctttgggcatttctatgttttcttaattttcttttgtaattagaaaaaaagaagcctattcataagtattatttttttttaatggaaagattagttggattggagctccagaagatccctgtccaccaaagtgaatgcattagccagggttgaaattgactcactggccatgctaatctctgccccaagggaagtgggacagacatcactcctatcattgtgcacctgccagttttcattttgtaaatccagtgggggttgtgctagcccttgccgctgaagcagacatacaaaatggttaggaagaagggccatggagtcagataagcctgggtttgattattggttctttctcttgccagctatgactttgagcaggttacttaactttctctatgccttggttttttcatctggaaagtggatttttgacaacccatctcatttaacaggttatctcattaaatgagatagtgtatagtaagctcttaacctagtgcctggcatctagtaagcaatcaatacgtgttaattatcattactggcatcgggcatctgtagagcaatttcctcttcaaactagactcataatgagaattagcctaaacacagtctgcagaatggtcatttttttctccttaagcacaaatgagactcagttgagatctgccccagtgtctaatacatataagattttctaggacatcctgattttatatagcattctttgattaaaggcaattcattttaaaatgtatatctaaatggaaattttttgaagattttaaaataaataaatatatgtatgtatcaggagaaaaccttagaggtctttattcacgattctgaacatatgatcaccatactgatagctctttgacatagaaggtgctcctccccacaccttctatccaaagcaagtattattccagaaaaatactggaaacctatcaggaatctttagaatatcgtccatttttttagagtcagttttgctattctcatgcgtttcttacttatagggtcaaaaacactttctaataccacggatggcatggaattcttccctgcaggcagccatcttcaagactgaaagcagaatttaaaaagcagctaaattagagactttacacagttgctggatcctgcttaatgagagacagcgaacattttgcaggctactgaacttctgaaatgtgacaatccaagcaaatgaaatcatggtacctttcattgtagtttaattggactcaaactcggcaagaggggctgctgaaagctgtattcaaagagacagacaggaattgtacaacaactaattcagcccacacaacacatcttacaactgtccaagctccacacttgctctcaagactgactcttttggtcaagagagagatagacctgcagtgaacaaaagcacagattgtaaggcaggccaaatactggcattgggaatggcatagctgtcaccccaagttatgcatttgaaatagctcagtctcatggcagccagtacaggccaatttattttaaagaggaaaagagaagtgaaacaaacttaggccctctcttctgcctgttagggtgtcaagatatcagtgtcaaggagtccagttaacagaagggtgaggatgagttgagcataaacactaacaagagaagaacttagcacaggcctcctgttgagtggagctaaatggcagtcccagttgagtaacccaaaaagcagagaattaccgtagctgtcaggagtgggaccaaaatcctgtcaggcagcggtaaaggggatgggaacggtttgagggaaaggcgagttttgtgggggagtgaggtcaagaagtagactgttttagggcatgcatgtctgaacttaggaggcccttggactgtttaggagggtgtcttggcttccttgttttgttcttgtatcatttgagctctgtggcctgaaactgattatatcatctcagccccttctggtgtaaccatcccgcctgaccacttgagtccacgtttactgttattatggctgtaggtttagccagtaaggctaaaagagtggacaaattgggtgcctgcatgtaacaggccatcctggacattgatttttgaaggttcattagataaatgctgacatcacagattgatgtctctttaaaccagtacctagtgcaggaccgtctggggaatcaaaaatattgatgtaaacatgtttgagtagaaggcccactggagaattccactgcctaaatgggatccatcaatttaggctttctttaattattctaattctatgcatcacatcaataggggagtttgtctgcagaaccggtttttatagggggtgccgcccctacgttaggggcaaaggaaggccggacaaggtatccacatctatttttcattgttgttttgagttgctgtttagtaattaaaatttttgatcatagactaattttcccataccatgtggccgtgcgattgacaagggactgattaatgggctgaccccagggccaggaggctgctgggctcttctcttgtggaaggcatgccggcaaaataaagttgatggttttgtttgtgtttaacccttcaccttggcactatcaatagattgaagacatcatttgtatctgcaagtgtttctttaattaagacctcctaaaaatctttcctattgattcattccattatcctattgattaactgcagtggatcatgtacttggtcttcagtggaaggcaacagcctcagccgtctgtcatgactacagatgcagaccacaggcagccagcagccagcgcccagggctggcaggagtgtctcgcgttctaatgaggcatcagcggtggctcactgaacaccacagagaaagccagttgtctcctgctgaaggggtggccaagcataaagcattccttccagttatttatactgcagccacttagctaacagtatgtacggggctactggcagtcttgagctgggggaggggaaggattctgctgtgcatctgaatttgaaaatcttgagctttgaaataaaagcagactctgaaatctaggtgcaaggcatggttcaaaggctgactgttcgtgttcctttccccaggctgtagttttgtgccccgccccatcctcacactgtcccccatcctatcagcctcctcactaggatggctaactaggaagtaccacagggggcttccgttttggaaggagcttccctctgactcggtcagaaagaagggctggcccttgtttttaccatctgccactggacatacatctaaatcatcccctgctattaaaaaatgaagaaacctgtggctggactagttcttaaacttcatgttttgcaatattccttaacattgacagttacaaagaattattctggttggagtttaaagagagaaggaccttattaggctgtagttgggtattctgggatatgcgaaatcaagtgagttaaaacactaggcacatagtaggttctcaatcaataaaccaataattgttgatccaccaaaaattcacctttcttcctctcctacgtgtcctgttgcgtccctattcaagcattctctgcctccccatccatcaagtagactcaagaaaatggccttctcaagggatgggacacctttcttcccaaatggaatccaacaggaaagagaaaatatagaagtgagggtaccaggcaggaggcagattaagttcagagaatctgatgtctctcttctctgactctttagtaggcaaattaattaagttttacttttggagtgaaaaattctaagactttgaaacatctctcctcagcaagtttataatggtcttcatcttcaggatcaggcttggcgtgggttttcaggaacgtgtgtggccctgagttaaagtcagtggcttttttaaaatagtccccgagaaaggaaggcagaaagtcccacctcccccatgtgtattttgggattaggaaagctagtggttactgggaggagctctctctcttctctctctctctctcccctttttttttttgaggagggaggtagagactgtctcaatgtgttgttctcaaactcctagcctcaagctctcctcccacctcagcctcccaaagtgttgggattacaagcatgtgcattgcacccagcccaggaactcttctttctaatatgagtatttatagaatactcatgtacagaattttcattctatagatttaaagaataaaaatttatagaatactcatttatagactcccatctatagaatattaaaatcaaaattgagtgcaaattcagggccgatttgtgtttcttctatcagcagttgttaacaaccaattgtttgcaccaaacccaagggcttgatttcccttggcactaaatgttatgttttgggtgtcttatagtctgtcctgtgagttaacattgtacaataaactgttttatcaggacttgctgatcatcctgcctgctagttctaccctcgaaaactgttttttttaatgcttatttcaatacttctgtgaaatttgacgttatgaagatatccccaaactcttctccaaaaaaaaaagcagaaatttacttatatctaaggttacttttcctaagccaagtgattcagaaacttttaggaaataattttgaggctaaatatttctgggtttgcttttttaattaacatgttttaaattagcatgtaatctgtcttcattaaagacatgttttgaaaattcagagaagtataaaacagaaaggaaaagtctcctgtaagcctaccaccttgggtaccactaggaatatttgagcctgttgcctcccagtctgtttttaatgcatatatacttgtatatatactttttaaagcaatattaggatcataatattttataacttttgcctcttttcacttactatatcataagcaggttttcttatctttaaatattccttgggaacatgattattaagggaaactagaattcccttgtatggatatgccataatttatttaacttttctcctatcattagacatttaggttgtttcctatttttttccctatcatataaaatgctgggatgaatatccttgtctaaaaattttgtgtgaatctttatcacctaaggatagattcctagaaattgaattaccgagccaaggattcacacatttttaaggctctaccacatactgcaaaatgttcttccaaaaagtgcaacaagttatataggctccccaagtagccagtgagcatacctgtttttctgtagctttaaccagaactggaaagagggagagagagagagagagagagagtgtgtgtgtgtgtgtgtgtgtgtgtgtgtgtgtgtgtaaactgttttagtttgatagtttagaaaaccagcacagtatctttttgatttaatttgcattcttttgataatgaatgaggtagcagtattttcttatatttaaaggctatttctatttcttcgtttgtgaaatacttgttcatgtcgtttgcccattttgggggaatgcttggctttttctaattgattcaaatatttttttctttttaattaagaattgtggccctttttcatagaagatcagattagattgttagagatcattagattggatttttcatgtagacatgaagttatacttggaatatctgttggtaatggcaatattattaacgtactttttacttttaaaaatggtttgttcgcctctgataaaaaagatatatgaaaaagaatctgacagtgtcaatccagctctcgttaactatcccaggacgctaccagcattttattacagttgtcaagaaaaaagaaaaccaacaattttattgttttgattattgagatccagccacagatcaactgagcaattaaaatctctaaataacgttctctgaattgtcaaacaaaggattagttcccggtggaaaggacttttctaaaagatgatagttttctctgtaatgtctgtgccagtaaatggttgcactaattggagtatacagaaatattttactagtttaacaatgcatgacatcctaataagattgtgatgacaagcttttctttttatgaaaggtgatgtcaccgcatgcttctaatatacatggactcatgtgtctttttgtgacatgctataaatgaaatttttcgatgaaattaatctgttttactaaatctttactgtatgtgaaattatttctttaagcagggcaacagagtcttgatgcttgtttttatttatagttcttagaataatatattttaaggaatcttagagttgagtagaaaggatcacaattaaatgcatattaaaatgcttgtcccaaatcccatgaatctgtcactagaatatgcgaggccggattccccatcttcccctagctcaggtggctagccgagtgcaggcttgggacggttaatgacaatcctccaagacaagcaggacttaacatcaatatccctcttcctgataatctgtatactctagaggtggtgagctctggcagggttttgatgattttatgatggcttgtgtatatttatagtgtgtttaaaatactctttttagttatcatttgagtgacacaacttaatctttcgatctttacctgcacctcctggtgatgtgtgtttgttaggtaactaaaaagaggaaattaagcaaagccagagctttatgccagcagtaggactgaggagtcaatagatgattaacctgcctttctcctcttcatgagaataaaggagtcactttttcagagcagcaccctagaaacatataatagctatgcagaaatgggcaacatttgagttccacaaagcaagtatacagggaaaagaatagcaggaaatcatttgaatgctgttctttaaacacactgatctatacccccgttgaaactgtctgtgacagtcagtgtcttttgcgttttatatacacatatgtgtttgtatgtatatgcatatatatgtgtatacatatatgccatatatgtatatattatgtacatataaattatgtgggtgtaagcagcatacgtgattggatgctgatattttgttagattttagggacttaaataaacaggatataatcataatcttagtctatcaaagccacaccttaaatgcatccctgtatcatttcatttgaaaaggcatgaaaggccagggtaattagtccttactgcagatgagtaaaggcatctgtgttaataatggatgcttaggattttgaattaaatattgaacctctggcttgcttttcccaaacgatgaggcataaccaccactctttttgaaagctcttattttttatattatgggtcaaaattttaagcaaaagctgaggaaaacaacttcagttaatcggcctatgtgattatttgacatatgtgattaactgactgaggtaaggagcgtcattattatatcataatcatcattatatataaaggaactccaggctaagactgccctcaaagaaatcttaaaaatcatggattgatttgcagatttagtgggatatgaaaagctgatgttgtgcctgaataagataagcattctttattagattgtagtggagaaagccctcacgtggccatgtgattttattgacagctcagaaccaaagaccataaattctgtcaggcaatatactgtcctaggaaatggacatcacagatgccaaagcggcctttgggggcccagtaaacgctgtgtggagtcaagtgaagaattaagccccagaccaagcccagtacctgcatggttatattttttagctggtattggtgaggcttggctgtcgtttgtaacacatccgtgcccctggagcagcttttctctgacatcacctgtgagtcacagtaaaggcccagtagtcatcctgaagccgcctcccccaccaagctactaacatcaaaatgatgtttctcatatgattgccaccttaagacacgggcagcggtaggacaatgtgaagtttgtgcccaaagttcagccagacaggaaaggaagcttcctgagtcccctcagtcaggcaggcaagtgttcatgttcagagaaatcatcaaatgcagagaggaaagaatggtgagctgaaacaatcagatggcaggggggcaggtcagggtggggagctgagtcagaaggaagaggtaggcaaggcctggaggccagaatggcaggcagtcggatcaagaatccagattagtggatttgggaagagaagatcagagactcagaaggggtcaggaacccggaccagagtgacttaaccataaaaagtagaaatctggttaagaggtgggcccttaagagagtgacataccaaggatggggcagtgggggcagtccattttagctccccggccccacccccatccatgctggtgacaagggggtgcactgtctgtcgaaaaacttccaaacaataataaaactaagagtcagtctgctttttattatcccctttcaccatcagttgtgatcaatgtaaaaatccttcctaacaaaatcttccgttggtctaaattctaaacagtgttcaaagttacatctaaagtttacatatacaaatacacatatatgtatatgtaaacttatatacaaatacacatatatgtatatgtaaacttataaacttagtaaaggatatgttactaaaatgtgctaatttgaagtgtgtgtgtgtaaatatatatattatttagtaaaatagtatataattatatataatattctaaatatatattagtaaaataataaatataatatttataatatacataaattataaatatatatttgcacacacacacttcaaattagcacattttagtaacatatcccttactaaatactgtgttcttcatggatgcagagttctcagttacacagtcagctgctgacacacacacagtcagctacacatgctcgtttctggagtcaattcattaccatttggattgttttgagtgcacttcagatagagtttgtgtctccagtgactgtagtgccacatctttctgcatctgaacagtagattcaaaatcaatagtgattaagatgaagaaacaacatttggggtatttcagctctttcctaccatgtgagcacttgaagtttttctttttgtttaaactctaaaacagaaaggccaggtatggtggttcacgcctggtgggtcacttgaggccagaagtttgagaccagcctcagcaacatggcaaaaccctgtctctactaaaaatacaaaaaataaaatttaaaaatttaaaaaaatctaaaacagagaaacagtttataaactactcagtgtaatattttcatttggtaaatgaacatgttcttctctacataaaatatttagctgaatttcaataatgtttttaagttgaaatttatttttcaatagttaagaaaattgttttttaacaattaatttgattgttaaaactaaataataaattttagaaaacattattactgactattatgtgacagttattgggaataatttgttataaaagacagataggtaaaaaataatctgcttcaactgtcagatatgctaggtacgcccttagagatggggtagtatttatgaagatctagtgagttcagtgcctgctgacataatcagtggtaataaggtaatacaagcacaggatggccaaaccaagaatgaagcttgattctgagctttatgaactggcatcgtcctacgttttctgggtctgaactggcctcaaagtgaagccagggctgaagccacagaagaaaatacataagtaaattttactagagttagggaatagaaacaaacgacgaacagacttactgttgatggcagccactagaagaaaaacacatagatgctacccaagtaattgctgcgggattgggaaacgcatgagactatggtaaagcagctccaaggccctgaactaaaactgcaggaagtgcaatagagaggcaacccacggggtgaggggccacactaaatgggcaggctctattatagcccaatagaccgaataggacctggtgataaataggaacgaagcaggccgcacagagagagcctggacgagtttcaaactggaacgtgtatgtcctatctaaggaggcagtcgcgactcggctctggccagttaccgtcatggcagagtattggcccagataagcagatcttcccatttttcaagcagagtcaaaaatctggactttttattaagatctctatttatttttctcttctttttaggaactaattcacattttttaaatattgcaagagtcattactatttaggccaaaataaatacctgtagatttaatgtagcccctgagccaccattttgtctcctctgagccagagccttaacctgttccagttgaatctgttggtcgctctccataccagtcataagatagttttcatgctttaggctattaggtttaataatcataagaagagtaggccaggcatggtggctcacgtctgtaatcccagcactttgggaggctgaaacaggaggattgcttgaggccaggcattcaagaccagcctggttaacaaagcaagaccctgtctctaaaaaaagcaaagaaaagtagaagcattcctgaatattacagacagtaacagaatggctatcacaacagtcacagcttgcagacaccaagctcctcagaaaatattctactaataataatagttgtcattgggctagtcactgagtgccaggcattgtgctatacattttgcattcacgatctcgttgagtccttacagtagctctatgaaatggatacttgtgtctgcatttacagataaagaaacttagcaaagttttataattttcccacgttcagttgtacagtcaggacttcaatcaaagcctctcttgaactgagcctaaattgccgatggtgaggggactctgttagctaaactgaggaaccacaggcagggtggccttgaatttcaggctgaaggacccatcacccaagagtcttggcagcttcctcagcaaagatgaatgggcttgttaggtggtttttgttacctgatcagtaattgtttcaacactagagtttgtcgttactgttgtcctgttatgaagaattctctttaacaaaactcatgggaaaagggactgactcatgtgcagtttggcctgaagcatttgcgtcagtattctgctcctggaagagtatactttgacttatgcattgcttgcttaatagaccacaaaagtcaacatccctctggaagaacagctcgtgcttggaggcgtcacaagctccaaaagatcctgttaaggcaggatgtagtgtgaaacccacaagcgaagcaaaaccccgtgtcccctaattataatgttaatatttaagaaagcttcagaggctgcctctgtgctttatgcctaaaaaggagttgggattttttttcccccttttgcttttcagacctggaatcgcatcaatattttttttcaacaaaagaatgtgtctcttgtccccaggtatggcaagggtacaaagaagccaacttgtagaggggagagagaagaggtaactgacagagtcagagcacgttggaaagtgatacgagaacaggggcttatggttacagccctaccccctttccaaagaaggcgattagatattatttcagatagtttctcactgtgtcctaatttcattttccagcaaccctgtggcaggtccccagtttttcttggacttatgtgattagctaaactagccatgcaggtattggcattacactcacagatatgaaatccagcctgacacccaatcaggacacattcttgagtggctgtgtggccccagagtctcccactgtcttccacttatgcacagtgtatctaaatagacactggccatgttcagtccaccctaaacccttgtgtcaatagccaaagaggaatcagatttgaagccaaaataacaagcactatatataaattactaaacgcccccaaacactatggcattgtttggagatagggcatgtgtaggaatagtaggaggcacctaatcagaaattcaaaatgaacagcctcaccgaacagatgggcagagtctatggactttccttccttcaggagaggatgggccattatttaaatttatatacagtggaagccactagaaccccattctgatgattaaatctggatgatcataatatccagatgcattaaacaatgaccttctcaaatcataacggaacagagatgtcacgtggctctggccaaggacgtaagtgagttcgttcaacaggcattttagttctggtgccaggtcattggggacagagcagagatacagcctgattttcctcagcatctaccgccccgtcagacagggggcaataattcttctcccttagttaaactctgccccacaccctgtttatctgaaaaattactccagtcagattctcctacttaaatattcatgaagatgttatgaggactatatgatgtcaagtaaagggacatggcttttgtgaaattctatttaaactgttgaaatgagggtggtgtcactctctccaaactttccagttccctccaataaacctgtagaaagcagaccaccagatgtttcaaacagtttggatcccaattccacttgattcttgctccagaagctgagaacttaggagcaacttcctgtggaaaccaacattcccaccaataccaaagttttataatatgtagaaaacatgacctctaagaaatgcatgtcaagtgcagcctggggcttggggtgtccagtccagaaatctgcctttggttaaggtattagaagattagggagttactcaaattgtccttaacattgttttcatatgtgttatgggccacgcatgctccatgacttttataacttatgtactctcatagacctacaggagagtccttcttccacctcagggtttgctgatagcctagatggtagaattgcagtaaggttaaacagatgtagggcctcatattgcttctcatacaattttaagaatccttaaagtcagttttcatggtaagcaaactttaatttaaaaactttgagataggagggatcattcttcattcagttcatccaggttcaaggactccttttggttgcaactgacccgccatgctgcttcagaagaaaccctttaaaaacaaacttcctgagaagagaaaagggttacaatttaggagctttttaagaattacctttgggtttttccaagctctcctcttgagtagaaaacaggacatgtcacagatatatattttcttaattgtaaaaagtaaatactctaaaatgtatttttttcattgtgattatgttacagtggtttctatgtaccatagattagatttttattaagggttttattaaataactggtgtttcaccaacatctaattaaatcttctatctaaattgaacagaaaattatggggggaaaagaaagcatttgtagcagactttattacagataagactattatttgttcatcttaagaatttgagatcaaatttacaagcagcatcctcatcgaatttcttttctgggctgctgagccctggccccttgaaagcagcccattatctcctcacctccccccattttattatagtgtcctggttgttggcaacacgcccgctgtttaaggttactttcattaattaaccgaaagttaatttctttgcaagcaaaatctctgatctcattatgttgtctttaaagccgaaagcttcaggttttctggtctcctttgatgacacaataaaaagcatgctctttatcttaagggaaactgtctccagggtttcatttaatagtccttgaaatagttacagcacagccaggcagactacaataatatgccagttttagaaaaccttggctttgtcatggttagagagcccagtgactgatgtgagctacggtggatccatttccgaagaagttctgcactttgcctcgagtcccatttttacacacgacaccgccctccctaccgccattatggagcctatttgagaacagaccaacaccaacaccagcatccttccaaagtgcaccactgcccagccattttactctctgggattttggaaagtttgcgggggctggcattttgtctgtttgcctttactaagctatcttttgttcctctggtggaagcaaggcaacattgggtggtaccaagagtttggggtagtgcttttggagcctggcaggcctggatttgaatcccagcctttccatgtacaggttaagcatccctaatccaaaatctgaaatccgaaatgctccaaaatccaaaactttttgagcaccagcatgatgctgaaaggaaatgcccattggagcatttcagattttggattttgaattagtgatgctcagccagtgagtataatgcaaatattcccaaatctgaaaaagtctgaagtctgaaactcttcttgtcccaagcatttcagagaagggatattcaacctgtactggctctctgtccttgaacgtgttatttaacccttctgagcttcagtttcctcattagtaaactttaaatgattatgtaaagagaattaaatgagataaaacaaagtagcaggtacttgacaaatgttactccccttcctttgacagtcctgttctagtcttttccaaggacaaatgtgtttctagagatggagttcatcctgatatttgggggctggcctacgtacagattgctataccagaaggagcagtttgggggagacagtcagattccacagagcatgttttggtgtggattggatgagttaggttctgtattgccccacatgaccttttacagacatggggacttaaacagtgtattttctttgtctctctgcgttagcttcatcttcagtgatgaaatcttgttgcttcctgaagcattaaattcagtgagttgagagtggccaaaatgtcttttcagagccaccaggtgtaggtcacacagaggggacagaactcttcaggtggctcaagtctcaggagcaatctagatacagggagaagccatttgtatcccactgagtcctgtgatgctgcacacacacagctgagatttacagaggccgggcggggagggctgctgagagggggtaatggcatgacctgccatgctgcttcagatgcctgggagactgggtctgtgccatttgcatatgtcctctgtacccattcctgatgaaggatgcaattgactcaactcaagcaggtcaaaatcacttaggcagaaaatcccaggccttgggaagaaaagtcatgtgcctcttgggcccttggcagaagtcaaaggtccaaggtaatgtattggcaaagatcctgtctgctttggtgccttacttactgctccctaatgcttttaggtggaaatattgtcaacgctattgattagttgatctgataatccagcaggctccctgatgtgttaaatttcctacttttggaggactataagtatgggcagagtgtatacttctgtaggaaagaactctcagtggaccttgctaagacactgcttctacagcgagattgctacaggcatgacaattccaattattcttttggctgtgacatttaacccttcccaagacaaattttctatagttatccattttttccagccttcctttagattttggaaaaacactttgtcttctgcattgggcctgtagggtctcttgatttattagcatggtttacctgtacgtttttagatttttattttttagtttattatgagtacattccattatctagatctttccctccttcacatgccctccatggccaaaatcatatttgcctttctccttgtcttttaccatctttaaacattccatcagccatgtccctcatttttaaagtatatagcaacttcatgaaggatatataattcataatgtgtagatatcaaaagaaaaggtgaccttaggccaaggcagtggaattttctgtaagtaaggagcatagagatgatatataaacatagtgatgacaaataagcattgaagtttgtttgcagattgtttgtttagagcttggtctggaatagcaagaaacctacataccctccgactcgtctcgctgtagttgttggttattcaccgcaccctctctctggcttcagtctccaagcccttcagccttgttgaaagggtctagaggtacccttgcacatccaaaggccacttggacaaatgatgccttcagcttttggggtccacagtgccatttcttctacatcccagcttactatgcttgacttcagttatattccccagtaccaagaacgcaggaggactactttaatcccctttgcaaaataacaacaacaataaggcctccaggcagagcacattgagcctaattcagattttttttaaagtggaaaacaaatcataaatacctgagaaatcaggttcataatggaagccccacgaaaccccttaacctgggcaaaatcctataacacaattatataaaatttcacacctgactgaagctgttattggaacaaaaataaccatttttctgctcgtgctaaatgaaccacaagacccatgtatccagccacagaaaaacacaagattgcccattccatctgcatataatcagcatacttgctggcaagggcactgcaggatcaaaagagttaataattggatcctgcccacagcaaccacacaattaaggacaagattagcagagatgaggaatttatggtgaaaatgcaatgatagtctgaaaaacaaaatgatttcaccgagcagttgttctgttgccataatcctaatgatcaactctattacaccaataataggagaaaaactaattgcagtgaggacaggacaaatctttttaaatctgcattgtcttcccaactaagtcccaacccatttgtattaacctttgctgacagagtcacatgatggacataatttcttataatttaccagctatggatctaacctttcttcatcaaatattcataaaggcaggattctcaatgattttctgtctctcttcaatttagagcttgttgtcttctttcttacagtaatttggacacaattgaagtcaaatggaattaaagttaaatgcctttagcaactgaggtgcctaaaagcaaacacttaggggaggggtcgtgaactgaacggggagagcttgtattcccaagaccctccacgtcccaaaggagttcagtgggctgccggcccccataaggaaaaagcaaactcagccagagaatgagatgccattgctttctcttggacttgcttgggcctcttgtgctgggtgctctgtagctgagttaaaactgagagcccaaggccttcccctgtcttcaaggcttgccaggaacttaggctgccatgaccaggccctgtttgagcatgtgtgcccagcagggtgcaaggaacatgccaggggctagaatagtggacaagaaaagttggttggtacagttacttagaaaacaagcgtgaacacctaaaaccattcctgaaagcgtttttggtttctagaaaaacatctgtttccactttgcatctttgttgctttgacacttttcttaacagggatgtagataggaaaaagtcttctaaagcttagatgtttaaaataagtatagtaaatggtcctttactcttcccgtcgcaaggcttcagttttactgggatggcagaagtttggggaaggtgagatagacaatcaaaagaactccctttttctactccaatcctcagacagccctacctttactacaatggcaaggaatgttgtaaattctccctcaagatgcaaaggaggccaagcacagtggctcacacctgtaatcccggcattttgggaggccagagaggaaagatcactgaaccaacaagttcgagaccagcctggaaaacatagcaagaccccatctctacaaaaaatttaaaaattagctggatgtggtggcatgctcctgtagtcctagctactcaggaggctgaggcaggaggattgcttgagccctggagttcacagtgagctatgatcacgccactgcactccagcctgggaaaccgagtgagaccctatctctaaaaagacaaagaaatttacaaaaacaagatgcaaagaaattgtttcacctagttgacttcaaagtactgtattgaccaagccaagaatttacttcttgctaagttcccagaattttattagaaaggaaatgagaattgaaggcagttgtaatctttaacagctgattcatgtctgcagctaaggtatttagttctagtcaccaccatttttagcatctttatcaatttttaactgtacaagtaatgcacaatacattcactttgtaaaaattaaaactttatagataagggtaaagtcttttgaccactgcttccaaacatagaccttcttgcccttccaaatattcttctatgcatttacagacatacatgtatccaacgacaaacatatgttttccttatttgttttacataagtggttattatgccatacaaatcaatacccacattgcgtttttactcaataatatgccttatgtttagaaatctttccatgttagaacatatcaatctattctttcagagaagtccatatactgtaatttagtatcattccttcagtgatggattttgcttccaggttttcagattataagcaattctgcaaaatgtcattatctggttggaactaagttcatataattgtcttaatggcatgcttaactagcttttgcaagtacagttttcttcagtatgtttctactgacctgatcattcaaaacactcttttaatgttttctaccaagccacacctccttcttgatggtaaggacaaaaacaactatgagatatttcgtattttgaatgccccacaaataaacagatattccaaatacggcagtgaattaaatgttttcaatagggggaaaatgagaatctcctgtcagaaatgcccaaggaaaggttgttatgaaaggaaaacatcattatggcaagtttcttgttacacaaattcggttatacagatcagaccatgtcccttgaactaccactgcacactgggaaaattcattcattcatagtagcgtccttccacacagtattcagttttccatttaccttgtttgctaacacccacgttataaagagttgtcactgattacataaaggatggtttgccaatcaggatatgcatacatggcctcgataaccatccttcagtccaatataaatctcttacaaatccaataggagatggcaggaagttcttttgaagaatgagaaaatttttccaggaaggtttgagggcgaattccgtgagaagtttttcaccagggatctcaggtactgtcattcctctggacaggaattgagtaggtgctgagatactcaccagttaattgcctttgggttagtggaagaagtaagtcacctagccagatcttatgcatttgcacaagtagagaatggaaacttccaatctgagtgagtttaattaaagattctagaatatttttaaaacagttcacactaattacttttagtttagggaataactcaaagttgggttaattgtgttgtcagttagtgaaaaccaacaactgacttgagaatggcagagatagggaaacagtccttccagagtgtaagagatactggatatctcatattccttcagctccaatttgtgctgttaattggctcagtctttcattctatactgagcactcatatctgcatcttataaaaagggaagttgggagacacggttaagagttaatggaaaaaacagataaattggacttcatcagaattacaaactcttatgcatcaagaatgctaccaaggtgaaaaaaatagcgtatagaatggaagaaaatattgcaaatcatataatctgataaaagtttaatgtccagagtatgtaaagagtgcctaaaactcaataacaggaagacaatctaatttttaaaatgagcgaaggatttcattagacatttctccaaagaagatatataaatggcaaataaatacatgaaaagatccttaacatcattagtcaatagagaaatgcaaatcgaaacctcaaggagagattacttcacacctactgggatggcaattaaaaaaaaaaaaagaaaagaaaataacaaggcaagcatgtggagaaatggggctcctccattattggtgggagcgcaaaatggtgcagcacctttcaaaaacagtttgatgggtcctcaaaaaaattacacatagaattaccatgtgacccagcaattccactcctagatgtatacacaaaagaattgaaagcagggactcaaacagatactgtgcatcagtgttcattgtagcattattcacagtgttctaaaggtggaaacaacccacatatccatcaacagaggaatggataaacaaaatgtgttatatgcatacagtggaatattattcagccattctaaggaatgaaattgaaacacgggccacagtatgaatgaaccttgaaaatattatgctacgtgaaataagccaaacacaaaggacaaatattgtatgatttaacttacatagaatatctagaataggcagatccatggagacaaagtagatgataggttaccaggggctgggagaagggaaatggggagtttgttgcctaacacgtacagcatttctgtttggtgtaatggcaaagttttagaaatagatagtggtgatggttgcacaacattgtaagtgtaaatgtgataattccactgaaccgtatacttaaaaatgattcaaatggcatatttttgttatatatattttgtcataaaaaaagttaatggaaccatatacagaattaaagcatgtcatcgacagttacaaaggcatccaatgaaagatctcataatatggaaaacgctatttcagttatgcattgcaatgtaacaaatcaccccgaaatgtagtgagttaaaacaaccacagtttattattcctcatctaagactccggccttctggggttgactagggctcagctggacaggtggttcttctgctgggttcactgagggtcttacccgtgactatagtcagggagcagctgggaccaaaaagctggttctgctgtgactctgagatttctgggcctctctttctccttgtagtctcagggcctctttctctccaagtggcctttccatgtgggctctccagcagggcagccatgctccttacatggcggctcaagacacctaagaatacaaaagcagaaactgccaggcttttttaaggaaatggcccagagtcacctgtgccgtgatctgttgttgaaagcaagtcacagaaagggccagtccaggttgaatgcaggagtgagtgctggaggtgtggtccgttggaggccatgtttggaggctagttaccacaaacaccatggacatatgcatggaacaagtgagagcaaaatcctcatgaaacattataggaaaccaacagataatatctaaaattaatcgatcaagaaatggtatgccggtacagtggctcacacctgtaatcccaggactttgggaggccaagacagaaggattgcttgaggccaggattcaagaccagcctgagcaacacagtgggactctgtctctacaaaaataaaataagccggaaatggtggtgaacacctgtagtcctagcaactcaggaggctgagttgggaggatcacttgagcttaggagttcaaggctgcagtgagctgtgatcacaccactgtgcactccagcctggtgacagagagagaccctgtgtcttaaaaagcaaacaaagaaatcagggtacatgcatattagttagagatacagaaggtaactaccatatgaaacaaatctgcgggttggatggatggagtggaacagtcttgctttttcgttgtgaacccttctacgtcattggatgtaaacctgtgagtgggccatgtttccatcatattataggggagtgatttggagcatgggctctggaaccagactgcctgggttcacatcttggctacctcactcacaatctttgtgaccttgggcaaattacataaccactcagtgcctcactgtttgcatctgtaaggtagggataataatcatagcaacctgatggggttactgggattattacatgagtaaagcacttacagtgccatctggcacatagtagatgctcagaaaatgttggcaattaacaattacaacattagaaaaaagaaaaagggctgggcactatagcttatgcctgtaatcccagcactttgggaagccaaggtgggaggatcccttgaggccaggagtttgggaccagcctgggcagcatagtgagacactgtctctacaaaaagtaataaaaaaacaattatctgggcatgatggcacatgcctgttgtcccagctacttggggggctgagttgggatgatcacttgagcctgagaggtcaagtctgcagtgcaccatgattgtgccactggactccagcttgggcaacagagtaagaccctgtctcaaaacaaaacaaaacattaagaggaaaagggaaaatttgcaggcaggcccatagtgaactaaggatctcaagacctggattctagtctcctgactttgacacaaatgggttgagcagtctattaaacttgcctttaaactgaggggggtaggagagaagataagaacctcccaagaacagagtctctaccaaatctgaagtctaaaagagcaagtcatggctgtccaaaattaccttgctgaaaaatgagaattccttctctttgaggaaagatctctagattctttacagttgaacctgttccttcatcctcacactgtacccaccatggagaaataattcacagacccactcgctgcctccccaaaagacctttctcctgggaaagaactttataaatcactttaagttagcaaccgtaattcccagacgcttacatgagacccactgaaaaaggacgttaacttggaaccagttaaattgcttctagtctttatttgctggcctcctgtacatctctctcttgcagaaggctattcacgtgatcaaccctaggtgagactgtaaggaagtttacctctgcttctcacccagggactgcagaggtcatgggattctcccttcttcacaccaggaagcagcaaggaagcagcatgctctatccaagaggtggcttaaactattatcctccttagaggtagttgcattgtaaaaatacctttccctcctttccccatacatttgaacaaaataaattaatggtagacttcctggcattagttgaaagccagagcaagagtgttcctggagggacaggaacactgtcctgggacccatccattcatgccacacaggcaggccacttgctgatggcacttacgcatccaaccctggccccggaacttactggcggatgcctttgggcactaggacctttgcgagtcagtctcctgctagaaagaacagtttaaattaggaatagcaagttctccaagtctcacagtctcgcccgagctaacctatcagctagcgcggcagaaaacgcataatggagcctccgtaaagtattctgtgccaactcccaggtggtctcagctgcagaactgttcttccaaaaagtgtaaattctaacttagcagtctgctgagaagcccagctccctggcaggccgggcacggggcaggaggtcacagcagctaatcaagtccttgctgtgttctcctgactcaccgccgagctctggcccagtcccagctgaccccactcctgtaatgctcagtgaggagccgaacttctccattaatcggcctgtttgcaggagctggaaaggtgacttgtaacaggcctcttgttcccagactcctctataatgacattctgcacaagcagatgtcgtcctttgattccttatgaccttctgaattttggcaaatgagaaagcatctgggatccgcagtgagggcctaagggtgtcttttctacaaagagctactgtcgtcctccaccccaccctgcctttgcccccatctctaccaggcacgtggcaaggacatggccttgcttattttccctgttggaaaaagccttcttcccagagccagggggctttgagatgaggtggcccagactgtcccatgcttgagcatttaccagacgtgactttgggtccctgtggctgtctcagtttgacagatgagaaaatgctgttgctaagggcccttcccaaggtcaccccacaagcaaacattggtgctgggagaatgagatcacccccagacagtgaaggaatgacagacccacgctttcaaagccccgaaatgtgacactccaccagcccgttgaccagagactacaagacagtaagtaataaatagataatggcctgtctctcctcttgctttctccttaaagatgcccaggtgggaaacttgtggttgtgatgattaattaataagtccgcccagttaacctgaagtttgcaggccatactgcaagcctaaggcggtctctttggcaactcatccttcttttccgaggctccagtgggctttattcagtggcggcattgctagcagcaccgcaaaaacttcagtcggaggacttcagaatttggcctgctctctattgaactacgatgttttaaaactcctttctaaccaagtcatttcagaagcaaaccttgcactgactcagaaggcctgttcagtcttccgtggctctcagcatataggattaccctccttcctcagcctgaattcacggcaccaaaaagaaaaagaacagcataaattggatgtgtgttgagttctgaagatacacatcaggtggacttgggaatccagggaggctttggcgtgattccttcttttctattccagcgcaaaggcgaacaatacatcaaagccttgaaggataaggtttacagccttccctccctcccagccccagagctggagtggcctaggacgccaccgaagaggcgtaagatattttgcttcatcaaacgaatactgtgtgtaggtagagcatagaagtttagtctcatgagatgactccattcctaagggaatctagaggctttctgcggagcaccgtgacatagatcatatcatcctcctgcttaaaaccctccggcggttccccatctcacttagagtaaaatccagtctccacagtggcttccaagagctcagacttcactgaccccatcctctccatcccctctctttgcccccttcctccagccacagttgcccccttgctgtcccctgggcatgcctaactcttttttctttcttttttggcagagacagagtctcgctatgttaccaaaggtggtttcaaactcctaagctcaagcaatcctcccactgcagcctcccaagtagctgaaactgtagacttatgccactgtgcctggctaatttatttattttttgtagagacagagtctcactctgttgcccaggctggtctagaactcctgaccttaagggagccttctgccttggcctcccaaagtgttgggattacaggcgtgagccactgcgcccagccctaatgcctaactcattctcacttacaatacccttccccaggacaagcgtccatcacaaccaccccagcctagtctcttccctcagcctctctattcactcttttttttttttcatttctctgcttgatttgctccagaacacttatctctagcagaaattatcttgatatttatttgcttacattgtgtggcaggcagagaatgttagcttttcatcctgtctcactttttgcttcttccttgaagtcttggttttgacagggaaagggagcaacgtccagctaaaatctcacacttcccagtgactaagttctaatcagtgagatccagatggagggggttacttgtcctcctttcaaagaggaggtaaggggatattatagccctctgtcttttctgctgccccccgcctgggactcagatatggtggttggagtgtcctggccccaaaggtgacttcgcagatggcagccatgtgctaaggatgacagagcagaaaggtggatggaacagcctgggttgcagacgtccatggtctgcttctgtgtgatggtccttagacttctttaatgtgaaataaaaataagctcccatctactttgaccactgttatttccagtcccccttgctagcagctgaatacagtttataaccgatacatgtgtttattacctgactttcctgctagcatgtaagcgccacaaaacctgggacttggtgtagttctctactggatctctagatcctggcacctagtaaatatttgttgaatgaatggatactaaaagcacaaaagtcacagaagtccttctgcccatatcctggctttatcagtggacacttagcaagcatcttcttgatcactgacccagcggcatagatatttatgtgggacaaagcaatgttagtttccaaatgttagctgtagaaagagtgtcattcatttcctaggtgtacaaaatgcagacttgctttggatttaaggccaggacactatgacatctttggagttcaggggcttgttaacatgacaatcctgatgctgcagtggcctggacttcttccctttctacaaaacagctgcaccaacatataattgtgctcctgtcataaaacatccataggcaaatggagcagtttattatctgtaaccttggaatgaagcggcagcttaaagactccataggttctttggcgagagtgaaatagcgcccaggaagtactggagtcaatgacacatatcgctcagaggattagaacttgcctgcaaaaatagcttttgaatcagagtttaagagtgagtggcagtaatcccaattttaccaagttcagtttagttgaaaagtgttggactagtgagtgacctaagtttcagccccaattaatatgacttgttatttatgtggttgtgtgacctggaacaatgctttcacttaagggcactaatccctttcataagggtaccaccctcatgacctaattacctcccaaaggccgaccttcagatactgtcacattagaggctaggagtttaagatatgacttttaggaggacacagacatttagtccgtaacagatgattgtcactgcttcaagtggtgtcagctgtgttgtcctagggctggaggccccaagatggactcatctgttaaggccttggcactagctgtggcctcattttcaaactgggattacacctttctttgctgccctagtagtgaggatcacatgggataatgcatatggacgtaagccatactgtttatatatataactacagtttttttagagatgggaagacctttagggattgtctaactcaagccctcattgtacagatctaagtaatgatggccagaaagtcacagttttgcccaagatcctagggtaaagtagtggcagaactgggtctttaactctcagaccagtgctctccctactataccatctggcttgttaggttgttagcttgctctttttttgttttttttttgttgttgttgttgtgttgtttttggtgacagggtctggctctgttgcccaggctggagtgcagtggtgtgattactgctcactgcaacctcgaccttctgggctcaagtgatcctcctgcctcagcctcccaagtagctggtactacagggtactattacttttacatgcccagctattacttcttcttatcactgttattaacttgctgtgtagcagggaaatcagctccctgttaaggagatacaattcagatgcaagatgctttcaatcccttgtgcactccacagtatttattgctgctaccatgtgtcaaactctgctctaggctttgaggatatagcagtgagcaaaacagacagaaatccctgccttcagagagcttagctcatgtgcgtgtgcacacacagacacacacacgcacacacaaatggcatcaagtgctacagagaaaaataggacagtgaaggaagatggggagtgctagagttgggggacagggaggggagatgtttgctgtcctgagtaaggcggtcaaggaaggtctccctgattggattaaggagtgacctgaaggggtaaggggaggaagccatgtggatattttaggggaggagtgttcaagggagaaggagcagcaggttctaatatgctgagactgctcttggccccttcagggtgagcaaataagccggtctgactggagcacagtgaacaatgggatgagtgcaaggagagggcagagaatcggggtcaggaaagggtccatcatggagggccctgtggaccactgtaagaattttgactttgactcagcttttaaatcagtttaattcatcagaagactgatatgatctttataaattagcatttttcttttgacccaccattttctccctaatcctgaatttgaactgtgtcacacagttggtattagatgctactgagttccctaccctaagtgacctgttagtgaatgtttctaaagaagagaaatccagaaagacccaggaacctcatgttccaaataaggttaaaatgaacttgtgaggtgtttcttggcatccaaaaaccaattaagcaggttacacggaagtagttctaaaaacagcagttcagtggcaggagactgacaggtgagcagatggaggaatcatcaactcaaatttatttcatagcctacaactcaaatgagcattccaaagtcagaacagctggccttttattctgtaagccattgtcccttgctttgcttatctctcaggagtatgagtggattatactcactggcagtctgtctgtcggtctttgactttgcaggggaaaatcctttgtagaaaaacaggctgtttgtgtaaatcagatttttctgtaatgtctgccgcttcctgcagattgtgaagtttctagatatggcattggccttttagcttttattttcataactgtattcgttacttacatgactgctattatttactcagaatcaagttgattctgagtgaatggaattgaaccacatagtcaaaaagcacagtcttccaatttgcaagaagaaatgttttttagaatgttgtagtgcgtttaaaaatcacagccaccttggatttctaatcagaagttattctggaatctttctgaagtttgagactgtcccatgcaaacgttacttaaatttcaagcaacagggaagtcatgagatttggaaagggttatcttttctcaatcatggtcctttgtggagttctgtggtgacagaggacagcggagagaccgtattctgtggctgaaaggagggcttgatactacccggtggggattttgttccagtaattgcatcaaattggacctgctgccatgtcgtaggtatagcatgaatatcattcattaagtcatgcacctatatgccttccctcccaatggctgagtcactagcagaatatattttcttccaaagtgtttgttttcattgttgccctttaaaaataatgagttcattctattcccttgcaaggaaagttactctagactgctttgaaattgtatatcttttgttgagcacatttctgcagtggttccatagcattgtgtgctggggaacccaacccggcctctcttaaagcgtccaaccaagcggcctccgacttgatacatataatcgtccagctcatttgacctttatattgttacctttgggcaggtagaagtcatgcaagtttcgggtgaccctatcatgtgaccagagatcaaaggtcagcagctcctaaatgttcggctgtcaagatagcccattcatcactatcattatgtaactgacaagcccacaaatgaactgggggataaaattattctcagccctctacctcctgggtttacacctcagtggtgggccaagcagtctcacgtattaagtggttccaagggcctgccacagtccctgaagtagggggaggacttcaggagacctatttcatgtgccagaccctgggaagtcaccagctgcctgcctggggagccaagttgccgctctacaggactctacagcggcctgagtctggtttcctctgaaatggagctgaattgaatgttagttctttctggacccaaagacacgtatgtctcccccaccgcaacccacctttagcatctttgtggtcctttgtggcaggttaacacagtgcagtgttttcaccaactggcctgatcttaagagtcacctatgaaaatgaagattcccaggacattcacctggaaagtctgacttaggaccaggtgccattaggaaactcagtttctaacaagggcccaaatgattctcgtgatgtctgtattttggaagaatgcaaagagatttcgaatcagacaattttggcttcaaatcctgaccctatcccttgtttggctgtgaaatcatggatgggttagttaatcttctgggcctcattttcaattttgaggacaaacattttaatagaagatgtatagaatcctagcactcatctttattattgtggggtttttgtttgtttgtttgtttgagacagggtcttgctctgccacctaggctggagtgcagtggcacaatcacggctcactgtaccttcagcttcccaggctcaagtgatcctcccacctcagcctcccaactagctaggactgcagctgcccgccatcatggctgactagtctttttaaatttttcgtacagatggggtttcactatgttgcccaggctggtcttgaactcctgagcttactatctgcctgcctcagcttcccaaagtgctgggataacagacgtgagccactgtgccaagccttattggctcttttaaatgtttttattagtattcttattatccctttggtgtgagaggagatgtcatcgaaagagcattggcatgaggtacaatgtctttataatctctcccatgtcaacaaaagtctctgataaacctacaggggcggttttgagagggacaggagaaaggcagtgctgtgaggatcacacatgctcatcacatggcttgggaggtgccctggtggatcccgcacactgtagcagtaaaggggaaaaggcagggcactcctctggacccctgaagaaagcgtggagatgcctttgagctatttcatgaccataagtggccctgacttccaaaccagcaaggggctcttgcatcccttatctcctcatcttctgacctcctggaggtacgatctgagcacttttaccctcaccccatagagcctttaccataggccagaggaactgggtttttttctttctttttttttttccacttttattttaggtttaggggtatgtgtggaggtttgttacataggtaaacatgtgtcacggaagtttgaggtacagattatttcatcacccggttattaagcccagtacccaatagctatcttttctgctctccccctcctcgcacactccctgctcaagtagactccagtgtctcttgtttccttctttgtgttcataggttcttatcatttaactcccacttaaaagtgagaacatgcaggatttgttccagggttagtttgctaaggataatagcctccagctccatccacgttcccatagaagatacgatcttgttttttgttatggctgcattgtattccatggtgtatatgtggatcttgttgttttttatggctttattgtattccagggtgtgtatattttctttatttaatctttcattgataggcattcaggttgattccatgtctttgctattgtgaatagtgctgcggtgaacatttgcatgcatgtgtctttatggcagaatgatttatattcctctgagtgtatacccagtaatgggattgctgggctgaatattagttctgcttttagctctttcgggaattgctatactgctttccacaatggctggactaaatgacactgccaccaacagtgtataagtgttcccttttctccccaacctcgccagcatctgttatttttttacttttaataatagccattctgactggtgtgagatgatatctcattgtggttttgatttgcatttctctaataatcagggctattgagctttctttcatatgctagttggctgcatgtatgcttttttttgaaaagtgcctgttcgtgttctttgcccactttttaatggggttgtttttctctggtacatttgtttaagttctttatagatgctggatattagacctttgtcagatgcataatttgcaaacattttctcccattctgcaggtcatctgtttactctgttgatagtttcttttgctgtgcagaagctcttaagtttaattagatcctacttatcaacttttgcttttgaaaccctggaagacaaactaggcaatagcatcctggacataggaatggacagaaatttcatgaaaaagacaccaaaagcaatcataacaagagcaggggagctcttaaccatgatttacagtgagacactctggttccatagccaggatgatgggaaacctttaccaaaacaaatctcttcttggaatcccaagttggaactctgaatgttctatctcatgaaaaataacaatcagctgggcattgttttgcgtgcctgtaatcccagctatgtaagaggctgagaaaggaggatcacttgagtccaggaattctagaccagtctgggcaacctagagtgaccccatctcaaaacaaaacaaaaagccctgatgttcatggctatttcactttatagtattattaatattatatttcagacaaactgtaggtcatgtaggtgctgagggaaagaattgggaactgtgaaaaccattgtttatatagaagctgtcttttgagttccaaacaaatgtggagaacgtaagacattgacagcagctgggtaccgcctgcactgtctccttctccaaggcagcaggatggcatagacccacaggaaggactctctaattatgctaattggccaagatccaggcagcagagttatctatgctaaatggaagaaagatttcttgtctgtgcatggtggcttatgcttgtaatcttgaccctttgagaggccaaggcaggaggatcacttgagcccaggagtttgagaccaacctgtgcaacaaagggagatgctatctctacaaaaaacaaaaacaaaaatagccagatgtggtgatgcctgcctgtactcccacctacttgggaggctgaggatcactggagcccaggagttggaggcttcagtgagctatgactgtgccactgtgctccagcctgggtgatggagtgagaccctgtgtcgaaaaaagaaagaaagaaagagttcttgaaaaatggatggtatttatgtggctgaatggcgttatgttggtattcaaaagcacttcaggtatatttggcagtcaaagggtttttaaagcacctgaacagcctatcttatataggacttctcacctcttcccagaagcgtgaggcccaaaagtagatgtatatacaactggaagttaagccaaacccggcttctcaagtggtcatggttgaagaacactaactactaaaaaggtgtattgacccgggggaaaaaaagctgacccctagggagaagtctggcttttcctcactctctgatgtgtgttgactttactgatctggaaacattaacgtggggaacagaggcaagaggttaaaagcctttcaaagaaaaagtgaacgtgtcttttgtcaaaactcatttaggaattggtttggtttagtggttctacaataggtaaactgagttatttgacatgctgacttgataaagccacctttgtccgagtagaccgttatgatagctgtaagtatgactgggtgactatttacttgtaaagttgtccacagtgtcatgatagcagtgacaaaagtccaaaaagacacattacaaattcattgacttgttcttttcagaggatttagagtgtcaagggaaagattattataaactagactgcaaatttttttcaccactcgctataacagattatttggagcaaaatatggtgagactatgaaaaacagtgcaatggagtgtcctcttccatgaggttagattttaaatgtagcgcttaaggtaggcatcatggaggtgagaattatacatggaaatcccttcaatttgtacatcaggtactggcagggatttagataccatgttaatatgaaaaatacttatctttacaccctggaatcactctgtatggcaagacatttgccacacaaatacacattagagtgaaatgaaccctcaagatactgaattgaacagaggacattagggtcccatattggtctcacgctccctttaaagcaaaaggccattgagaggattgttgccctatgacatcattatttcctgctgatctggcaggtgggttttgcaggttcatgtggacttgatgtaacaccaatgttttctacctgaggcctctttttttttttttttttgggatggagtttcactctgtcacctaggctggagtgcagcggttcgatctcggctcgctgcaatctctgcctcccgggttcaagtgattctcctgcctcagccttctcagtagctgggattataggcgtgcaccaccacacctggataatttttatatttttagtagagacagggtttcaccacattggtcaggctggtctcgaactcctgacctcgtgatctgcccacctcagcctcccaaagtgctgggattacaggtgtgaaccaccttgcctggctcctgaggcctcttaagccttggtattggcttatgctattgcacattaggagaatgcattatcatgtagctgatgccctcaaacagactcctactcagcatttggccaagtgactgtcaactccttaaattcaacttccagaaaaaacactgacttaaagaagaggagacttttaaacactgggtattttctgatgaagctgtccatttaaactgctctagtctttagaagtgtgatgtctttcgtttttatttgcgagcgttacaagcccttctggccagcgttgcatgatcactagattgatcagcgaggttttaaaaataggacttgtatcacataagaagagggatactgaggcataattatacatttatatggtagtttacatattttagagtgcttttatatgtgttatttgattttatcttcacataacccggtaaagcagagaagcattaacttcattgtaatagttgaggaaactaagagattgagatatttttctcaaggtcacccagggaatatattaataattagagatagtttatgccctcagaagctgaacatgtatcttttatttctatagactgtagatacttatgctgtaagggcctcacagtcaaaagaatgaaaagaagaaaactaggttttgtcagtcatctgacataataatagtccttctagaaactggaggtaaaaacaacatttgcttctttcctctgaaatgatttggaatgtcctgcatatttaaatttgacaagaatagctgactagtcaatggacaggatccattttagtccaaatggaaatccatgaaaaagatggaacggagtgaaaagggcagccagccagatgtccaggggtctgacccgccctggctcacttgcacaccgttccatcaaaccttgagtaaggcagccctcactcaaactggggatccaaatacctacccctgccatctctcctagattattaggaaagtaagaagcagtgctgtggattgacattattcgggacatttaaacattgtacaaaatgtaattgttattttaattaggagttgttctcctctttcccactgaagaattccctcttaggagttcatttctgttatctcttcagtggcccatgcttggtaatatttctccatcaagttctagtctgtgtgtgtgtgtgtgtgtgtgtgtgtgtgtgtgtgtgtgtgtatgttacatttgcttattctgatgaatctttcagcagaaaccatttctcctgaaatctttatcatttcatcaagagtaatggaaatgttacctgtcctttatttgttgcaaaatttagggacaaggaagaagaccgtgtatgttttcttaaaatcaatggccagcacattactgtaaaacctattgattaaaaacacaaagtataatgttagtcatttagtctgtgaagtgatgcaataagggaagaaatttatcctttgacttttgcattaaccttttattgactgcttgcatacccataattaacacacactttagctaaagtggttaattttagcatggtgaccagtgttcactaatgtagctgcaatcccgatcttctaaatgtaagtgcagccctgggggaaatcagcgggcagtgacgcccttcatgagttacaccttggtcaggaggacctctagacaatctgctagcagccagccaatgtgacacctttcggctgcttcctgttacgtcactaggtcattcagggagaaccactcctaagtagctgagagttttaggaggtggtttatagagtgctttgagtcaaaataatgtgaatttaggaaggagagagagaaaaagtatatatataatatatatactttatatacacatataatatgtaatatagtatatattgtatataattatatgtatttattatataattattttatatattatataatattagatataattattctatatatttattatataattataataatagttatatcatataattatataataaatatataaatttataaattacatataatagttatatcattatatattatataataaatatataaaattatataattgttacaattgtatgtaatagttatataattatatattaaatatataaaatatataattgtataataataaatacatataattgtatattttaataaatatataattacatattatatatacttattatatataatttatgtatatcattatatataataattatatataataatataataaatatattattgtatataaatatataatacacgatatataatatattaaaagtatatgtacctactatattatgtatatactttatctctcttcctcctaaatttgtattataaattcacattacatattatatattatacataatatataataaagtatatagtataaaatacgtatatataaaatatttgtatttattatatttaaaatatttatatataaaataataggtatacatataaagcatatgtttacaatattttatgtgtatatacatattattttcctttgctctccttgaactgcttcatgaaaggggcagtattttctgaacagatccaagtttatttgctaacccaagaaacattttaaaaaatgggatttttccttaggataggattagagaggacaggattgaaaggggaaactgtaactttctaattgtttagctgggttcagtaggacttgggaatgacactgagaagggaatcttgttaactttctttagcaacattatccagccctagtcctgaaaattggcttattttcatgcaaaggccagtgtggatggaccagcattctcttgttttctgggcagaaatttgtcccaaatagaaatactatttgaaacaaaaccaaatgtcagtgttttcatgggttcatacccaggtattctctgcacacactacgctgtatcaaccacaacatctcagtttggagagactatctgcattcacttggctaaggcaatggatgttataaaaggcaggaaataactgacagcaaggaagcatggccggcatatcagctaggattctttacagaaaaacctaactcagacaataaagtctcatgaaactgaaacatctaagtgaagcatgactcagatactcaaacagcatcgtacaggacccaccccttgctggacggcagcaaaatgttgatggcagttccacatcacacatcctaattgttcataggccaggagaggagaaagtcttttcctttagctcccataccagtcctctgatttattctcttgattttgccccatattgggtcatgtgcctcctcttaaaccactccctgtggctaggacagcgtgatgtactgacgtagcttaagccaatcaaggctctcccctggctgtagaggtggagctagtcccacccacatcaagtcatgaagcatggggaagggacaggtaccccacaggaaaattagaatcctgttggtggaacggtgggagtaaatacaggacaacaaatttccatcacagtcagtattcctcacacatttcgtaagacaatttggggcccctttattttgcaagagactatgtagagtattgtgtgctaagaaacaatccaactttatttcctgtaaatacaaaatcagtctggaacaaccaccatttggaaggccagacgacaatgccttttatcaatcctaggtcttcaggaataactgctgatcccttctgaatctgaacattttagcctgacactggaaagttgtagcagcttgaatacataagcctcagggtcttggaatgtcaaaatgtgataggatccagccttaggtgcaatttgattcaagccagacagagctgctcctgtatccccagagcttcccctagaaggagtctgtctagaggctacgcacccagttagtatgaaggaaggagactgcccaagtataacaggcaactctctcattggcatttctcatctgccactggtacctggagtagaagtaacgatagtggtaatattattttataggtattgggcgcttgctatgtgccaggaaatgttctaaacactgcgtataattcatgtaatcttcacatcaaccccataagtaagatactattattaccgtcaccacttgacagataagaaactgaggctcagcgaggtaacaaaacctgcccaagacgtcatgcccctggagagcagcaattccggcaatcaagagaacacactctttaccaccatgctgcagtctccctgcttcccatctttggaaattaagatccaagaaggaagaatgagtgacctgagcaaaagaaatgaaaccctaaagggggacagatgtgccttccagtaattcccaaccttctctttatcagttccatagtctggcatgattctaaatcacaaaatatcatttgagttggggatgtctgtcctttttcatgggtgactacatcacctccaataacgagcgctctgctggcccctattactatcatttggaaattggcaaggaacactggacattaaagaaaaaactttaaagtaatcttgaaatttctgaatgaaggctctgaagaaacccaacaaagggttctactcctggcccagatggatgcagtgactatgtgcagcttgtctgtcagagcttgcatgcaaaggagccacttcccataccagccagtctttgtttttttcttcttcttcttcttttggaaagagtcttgctctgttgcccaggctggagtgcagtagcacaatcttggctcactgcaacctccgcctcctgggtccaagtgattctcgtgcctcagcctcccaagtagctgggatcacaggctggcactaccatgcccagctaacttttgtgttttttagtagagacagggtttcgccacattgcccaggctggtttctgactcttggcctcaagtgatctgcctgccttggcctaccagggtgcaagggattacaggtgtgagccaccacgcctggccccagccagtcctttgatgagaagaacaacagcagaaaactgtgaaacagcttcgcccaaaagaaaagccattgggattgggaagcttgtacaacacagcataagcaaacctctgcagcaggcttcgatatgtttcatactttctcaaagtacggaggcaaaacccatttgacaggtgaaaaagcatctctattgactttctacaaactttatgatattctaggtggatcgacacttatcatagccctttaatctgccagccaggataatgtgtgcacggacaatttatccactgtgagattgaaatgctcaatttggaataactttccctacccagtaaattgagcattactctaggattctgagacagagagaaagcacaattttaaaagctttgcagagttcctttgtaattagtcgcagctttccttgaatattaattttccctgcatccctttcaagtggttgagagactgtctctacaactacagagatgcaccctcagaacaacgacagcaagcggcatggtctcaaacacctatgattaagtagtctacagaacgcaccctctgttcttcagtgcagtgtgtagcttatcagtgcaaacagtttaatatttatgctaagaggattgtcaaaagcagcttctgttgctttaattcttgttttaaataaataatgagaacatttaaacacattactcttcttggggccccggggtcagctaatcttattatttatgaagtgatgtgctacataatagtacttagtgcatgttaacagacgctattatcagggccggatgcagagagctgaagatatattagaatgttatgtgtaatgtacgacggattgagtgcataggatgccggtgtagcaattaaccacactcgaaaataggtgtaaagttgaagtatgttttccccggggggatcccctcaccattaataattccccagagaagaagatgtctttcagttaggaaccctctctaccatcaggcttggaaatggggccaggatattccattctttgatctcttcatagtcagtcctacacagtcagaagacaaatagtgagcatgaccactttttaattgatttagacaaaaatggagagaaggcgggggtggagggaggcacatgtgcaatgctcccaagtgtcctcatagtgtttggttttgatccactcgttttcactgccacgtactccaggagagtcgagaaattgttcattccttaatgcaatctgtttccttctctctgatcctcattttgcagataaataaagctaaagccactgagttttcccaggtcactttttaaataagccagtctctctgagagatagatgcctgccaaggtgtaagaacgttgccccaatttttttcctgtgaggctataatttagcttcatatgataattaatttctctactattgatgaataatccattcaataaaaaccgtgatttaagtgttttccttagggactaactcttgctggcctcttaatttaattttgtgcaagtttttcccacctcttcatcagtggaaatgattattaacctctatttgcatatatccttataaatcggtctctccttggagtgcctttttctgagcacagcaagctgggacacttgtaaatctccaggatctccaaagtcaatcccggcctgtaatattgtttaatctattcttggacgttttaatgcagtaaattcaatttaatctttcccagtaatctagtaatacattgaaatcccacaaacatttaaatctgataatggcttaatcacacactttaaataacagttgagataatgaaaaaataattcaccattttaaaggcagagtaactgaatttccctgatgattggcttctacgaagccacctgagataatacaaatctgggagtcaaagcaaaggaagtcccaacaccatcagaaacagtcttccttcttataaacacctgcgttccacctgtagattcattcagtcgtcaccatgaccttcacccccgaggactgtctttggagcattggccagtgttgctccaagcttcctgtgggttggggtcttctgggggtttcctcccgtggattaatttcctatttttactcttccaggtgccagtcacgaattgcccgaacattacctgctgatcagaagccagaatgtcggccatactgggaaaaggatgatgcttcgatgcctctgccgtttgacctcacagacatcgtttcagaactcagaggtcagcttctggaagcaaaaccctagaaggagcacaagtctcaggcggaggagaaaaagagatcggcttttctcctccaacgttgtcatgggcttaagcaagagcagtggagacttctcttggcccctagattgtagcacccgggtcccaatccaaaacagctaggaaatggtgcccatgaagttttaaatgttttaaaatgaccctgtgttatagtctgatttggtgttaaacaggaccttcttcccccaaaattgttcagattataaaatgtgagccattcagcccccaaggtccagggcaggcgacaggaacgagcccagcgtgtgacaaagcctaacctactttcctctttcccaagctttttcagagactctggagtggacccagccctctggggaaagacagaacttagagacatcccagttactcaccacacccatagtgctgtccaatatggtagccactagctagctgtggctacttcaatttaaattcagttttaattttaattaaaaatgcagctcttcagtcgccctggccacatttcaagtgcttaacagcctcatgtggctagtgactgctgtattggacggtacagatatggaacattttcatcatcgaagaaagtcctattggacaacacttctataaaaagtttgagagcaggaattctcatttccattcgtctgtagcttctatccccaaaggcaaagaaactaaaagagaaatgactcattgaagattggcctctttcctttctctaagacaaacctaagtaaaagcctgagctttgagtcctatgctcagcacacgggaaggagatgttaataattaaaataaagttgatatcctgtctttagggagttcccttgatctcttgaaagagacacagccccatttacattatttcgtggatttcaccagcatagtatagtttttttctgtaagtccctcattcttatgtaataacaggtggaactgaggtttgaagaacctcagtggcccatcctgatgacattggagactcaaagagacaagagagagtagggtttaaaacctgagctttaagactcccactagcttcgtgtcctttggcatgttaacgtgcctcagtttcctcatctgtataatggggatatatgaaaggcaccagtcctaaggtgaacattaagtgagatgattctagttacagacttagaacaatttccagcacatagttaaatatccaggaaattctggtactgttatgtgtgggtgagctgacctggatgtagatgttttcctctctcttgctgacccctccgccagttttgtcttgtgatgccattaacacatctctccctttctgacctggctcctgcccattggtgtcccaagaaatcgtgagaatagttagccccccgtctccccagcctgttgctttctcgtgtagttgttcacagtagttgagaagttgaagagcttttgcctattgaaggtgcactgagaataaactctttcctgccaccagaattgcagtggttcacggcctgcactcattcccatgaatgcagttaatagccacagaaatgtcacattaagcaaagcagccagggtctcatcgtgttgagactcgagtctctcagaccttggattcattccctggtgtctttgagcctcagtttcctcattggtaaaagagaagtgaagcagtgtctcacagggtcattacagagattaaatgaaataaatgaaataacatagaccaggagggcgtggtgtttaaaagtcacagatggggcaccctcgggccatccagcccagtgttttctttagcccctatgatgttcattttttgttatatcccattaggtgcccatatttaaaaattgggagatttcacataaaattaaaaggtctgcattttcttttttcttttctttttttttttttttgagacacagtctcactctgtcaccaggctagagtgcagtggcacgatctcagctcactgcaacctctgcctcccaggttcaagtaattctcctgcctcagcctcccaagtagctgggactacaggcacgtgccaccacgcccagctaatttttgtatttttagcagagatggggtttcaccacattggccaggatggtctcgatctcaacctcgtgatccacccacctcggtctcccaaagcgctgggattacaggcgtgagccaccgcgccaagccaaggtctgcatttttctttagaactcagaacacccaatagtcctaggcccccatcctcgcatggcagcaagctaaataagcatcttcccactgcgagttggggcatgacccagcctatggtttgccatactccctctttttctccgttttttcattaattgtgaacctgacctgcatcaccctttcatgtcagtgctctccaaacctgcttgcttgcacccctctagtcgaaatattttgtgcttaccccaatatatgtgtgtgactattgaactctattcgtagactgcttgtactaatgtcatttgcatcataaaatattcatatccaataaacatattaaaaggatgagataagaaaccgagagattttgctgtttttttccttttgcatggatgagccagcttcactgtcctgggtggggcccaggtggaattagttctcaaagtcctccaggtggagtcagggaatgtgcaacagggttggagaaatcactactttaagtgaatccgaaaggtgagatcacatttgctctaaagaaatggtgatcccagcactttgggaggctgaggcagcagatcactggaggtcaggagttcgagaccagcctggccaacacggtgaaaccccgtctctactgaaaacacaaaaattagctgggtgtggtggtgtgtgcctgtaatcccagctactcgggaggctgaggcaggcaaatcgcttggcccgggaggcggaggttgcagtgagccgagatcatgccactgcactccagcctgggccacggagcgagagaagaaagaaatggtgactttcattgatcatgtgtttgaggatttcatgtgctctccagggaggtttcaggtgggtagaaggaggtgggcaagacccaataaaaaagcagctggtgcgggcaatgacaatgaactcgtatcctgcagggtcaaaggaaggcttgcttctgctgtgaattggagaaggactttcctggaagcacaggcccagaaatcgcacccttctccccatgtgtgcggataagggaccacttccatcagcagcagccccctcctgctttcctgccagtcctccctgtggtcccaggtctcttgagaaaagtgatctaagagatccctttgcaatgaggtgctactgactgccctacctccctcccttcctcccatgaatgtttcttggtgctgaccacagcctcagcaatgaggcaagcctggggacccaagacagatctctgcctcccaggctagtggatgccctgggatatgtagtcaccaaaataggaacttaccccatagtggggaaatagacagtaagcagcaaatcaataacaagagtgttccagatggttgtaagtgccaggaagggaaccaactgggagagggacaagaggagatggtgactgaccaaggggaccttgatcaggctgtggggaagggaggtggttgggaagagcttcccaggaaaggggacggcgggcccaggcaggagagccttgggagggggtgcccaaggaaggaaaagggccctgagcctgaagccgagaagaccaggaggggagaaggggagatgtagggcagagcagacgggagccgctcgggttttattccacacaccccaggaagcatgagagggtttcaagcagcaagggcatggaagtaacttggtgagatatttttatgcattagatcatcgctctatctggattccagagggtctctgagagagcaaacagcttaatccaaaggagcggctttccaactgggaatgtccccctggctgggtgagatctcaagatggcctgcggcccctctagattgcctgcctacagagttcactctaaacagcccctcccctccacaccccagcagatccattcctgacgccctcactggcaggctccagccccacagagctttctagacataaaagagcagggtcatggcatcattggtgacacaattttagtaataagcttcaaaacccatcactccactgaatccagggatgccagaattgagagtccataggacccgtttaacggatcccacattcagtagacggttttttgtatgcttcgagggaaggaaggtattttcaaatgcaacttcttttttttttttcttgctctagttagggctgattttaccactgggcaaattgcatacatttggatccatgccacgctaaaaactgtttattttggagatctgtcagaggcaagcacatggaagacaaggggattctggtttgaaaaggcaattctcatccagacagattcagatggagaggagcggtgtggattaaaatgcgccgaagtggtaatgccgtttatcccgtttgcctttgttactctgtgattaaatggtatttttaattaagtttcattgggagccataggtatcgcggtggtgaaatcaatttgacaaccataaaggggagagacggcacaggcgtgttgtgatgattgcggctgtagggaaagccgggcagcttgcagaggatgggtgggaggaggggaagccggctaagaatgacttcctgcaagacagcaagggcacccctgggccactgctgtgtttgggaggcaggttttgggggttgtcagaaggcattcacctggttctctcgctcacctgagacacccgatagattcctggaaactccaggaaagtatctgaagatctggttctccattctctcttattaacaaggagaaccacaagtgccccccagatcccggctagaaggaccagacagctttccaccccggttcccaggcagccctgctcccatagtcctgtgtcccatcggccccatgctcccaggacagtcctaattcccacctctcagaaccttgtcagccaagttcttcctgctctctggcccaaatcctcctcctacattggaaactgagcctctctgcatcctctgctctttctatcccgctgtcattcatcagattttccaaatctttggattcctgagtggcagaagaggttttctgagtttaagttctgattctgtgtgtgattctcactctaccacctcttcaaacctttgttgtcttatctacaaaatagaatagtagtaatccatcacctaaggttgttgtgaaggttcaataagttaatgcgtatttaaaatgcctcccacagtacctgacatatactgggcttcagtgaggtactagctattattattaaccaagtttcctgtggtaacagttgtagctttgtgactgggccaaatcacttaacccctctgcgctccagtctttgtttctataatggggatgatgataatgcctagctcattggattgttctgtcccctacgatcagccatgttaagtgattcatatcatgtctggtacttaaaaatcacgccacgcatgtacattattatgatgaaaaatatgatccgtgatatcctgaccaaaatattaaagggactaaagatagctgtggcttgttcaagaagaatattgtgtcactatcccatatattatcccatttgctcttcacagcttccatttttcgctaggcggatggcatggaactttttataaatgagatattatgaaaaatgatgttttaggactctcatttctacagtgggagtaggtcacccattgcaattttggatttgcttaaaaaaattcttgccatcaccttctaatggatgatctgtgtacaacaattgtttattgactctgaatgtctaagtaccagggtcagtctatttcaaggggagggaagcattaattaacctccagcattagattcagtgattcttttccaatgatgcagttcatgactttgctcgcatttacttttcatcaatcctgaaagaattgaggtaaaatagttcctctgcacatgtgtgtcaagctaaatggataacagcagatacagatctgtttgcctgtctgcacttgcctttagacaaaattcatcaattttacaaaagccactgactaaacatggcaccaatacaaatgaagcacttctagcaggcggagattccctttgtttctgatctggtaaatgcggtagtttcctgctgagagatgggaagtgctggcctaggacagcaaggtgccctacaggtggggccaaaagggtcaagaccgttctacaggaagtttaggagaagttcaatggttccagatcctgtgtgcttcgggtaattctgaccctcttcattagtgataatggcatgaagctctttcacacagtcttttttttttttctttttttttttcagacagggtctcaccctgtcacgtaggctggagtgcagtggtgagatcacggctcactgcagcctcgacttcatgggctcaagcgattctcctgcctcagcctcctaagtagtcgggatcataggcacttgccaccacatccggctaatttttttgtagagacaggatttcaccacattacacaggctggtttcaaactccgaggctcaagtgatctgcctgcatcggcctcccaaagcgctgagattacaagcgtgagccactacgccttgccctccacacagccttgcttggtgttaaagattaaacaaagaccacaggtgatcactgtcttcgtggtgccagtttcaagggcacccttcttcccttcccagcctccgagagaaggagagagggtccacaagccagatccatccccatccacacaggtaaaaccacgactgtgcagctagcaggtggagataacatttggaaaaaggctttgtaaatgctaaagtcctactcaagtccaagggagagaaattattattattcgttttgtgaaaccaatttagtttggctgggtaatggaagaatttctacatacattcattacttctgatcaggcaagaccagtctgacacaggaacagtctatggctcactcttaaagccacagcaggctgccagggcttggagaaatagaaacctctcttgcacaagaatagtctcaatgaatcatgttaaggcctctttaggtttttcagactccatgcaccctgtggaaactgcctttcttgagtagaggtacgttcagcacttcataaaataatcttggagcctccagacacacggatggaggagcatgatttcatttgtttctttgcaaaactgctgtccccaactgaaaaacctgattatcctttcaaatagggaattcggctttccacgttggaaccagaacagttaaccttcaaacccccaaggcttgcaagagatgaatcagtttctcagacagccaaagccgtggcttataactcatccaacccagaaaactggaccgctggtcaccttccttccccctgcccccaactctgcagacagaggtttcccgttgattatgccttgattagagtcaggagagaagcaaaccaggtatataggattccattatccttccctcctctgctcccaaccagggtcacgctgagagggatctcggtgaacatgtgaacaatcaagccatgtttaccatggacgtttagttttcttttctcaaaatcaaaacagagtttagtaggcagcgtatttcatacatgccccttgatcaatggaatgatctgtcagaagccattaaagcccccattagcttgaatgcattcaaagctaaactattggatcatttaagggctgcagtgattgtttttaatataccgtacattgatttctccctgtgagcagcaacataagtttgaaactaactgtgtatgactaaggctccatttgctgtctccaaccctctgtgagaagcatggtttcacttcgaccagaaatgtctgtgtatagttttcaaagagatgcagaccctgttcgatttcccaagatttagactgggtcgggttgttatttcttttttccctgagctttctcccatttctttgtgcccattaagtgagctgtgcgtgcagaatgggagaggcatccctgccaaggacttcaagtgaaaggcggtgggagaaattgttctgaaagcatgaagcccagctgaggccaaaatcaaagtgaatttgacagccttgggccagcaaaactctgtacccagcagaaaacaatagatgtgtggctgtgtcaggggcatcctcactgggacatagcttggggagctgaaggtaccttggaagggccagatgaggaagctagccaaggccacaggccttcctttgactgccatattgccagctcttcatagtattgactcttcagtcttagccaacacacacttgttgattccttccggaatgtcagactctgctagcaacacaaggtccctgtcctcaaaatcctattcttaatcagcatttctaatttctgccctttgctcattttaatacagagcctgaggataggagagcagcgtggtgaaagaagcaatagttaccacatttgcaaaggcacataccccaaagagaagtttttaatatgtcacacccatattttatagatggggcaatggaagtccagatgggagaagttatttcaggtgaattatagaaactggatttcaagtttctgataagtattgaatttgggaaggctgtgaacattcttgagcccccctcccaagttcaccttcaacatcctaaagcaggttgaagaggaagatggttccaggtcacttacaagaacaggaacagcccctccctccaaatttgagcccagaaaggagaacctttgttactctagaaaacagtgtgtgtgctattgttttctccataggtcacaaacatccacaagatattggtgattttacatattattagagccactgaaatttatgatgcaggatattaacgtcaaagaggccaagatgcatcattcagaacactggcaggtcaagcagaaaccaccgtagtaaaattgaaagctggagtcagcaaagtatagcccacagccaaatctggcccatcccctgttcttataaagttttattggaacgcagccatgctcatcggtttatgtattatctatggctgtttccaactacagtggcagagctgaatagttgcaaaggaccatagggctatcaaagccccaaatagtcattgtctgacccttcatagaaaaattttgctgaactgtagtctagctccaaggattgttgtatcacctgtgatcgtgcctattaagcaattaacgtcatgtctagtacttagtaatgactcagcatgtatcaattacgatgataaatattatcatggcatccaaaccaaaatactcatgccaacatctctctgtacagaaacatggaaaaagagcgatgctattaaggaggaaaatggagccaggagcaaaacctaaggctatttctgaactaaagaggcctgaataaggtagtgaaaggaccagggaaagccttcccacggggatggagagccacctcctccccggctttctggttcagatgtcttgtctcaacagacggcagattcgcagggaagcaggccgagcctgatcttttctccgctagaactgctcaacaggtgaagaatctttttccagcactcctgagcccttcgggtcgcggaacagtgcgaagattattccaatgcctcattcggagaggtgataatctggtctgtggtttctttttcggtggggcatggggtgggggtgagtgtcatgctttctaaggcacagggctgactaaagggtgtcctatttataagtcagtaaaacacagcggcttcatactctgtgcttattacccagaagccccggctcttagagtttctattaagatgtacctcataaatatatacgcctcctatgtacccacaaaaattaaaaataaaaaaattgaaatcactcatttatgcttggtgttatgattgtaactaagaatcctggagtgagctggttacaaagtgagcccgactttccatggatgcaccatcctagagtgcaccgtgagcccggctttccgctgatgcacagtcccagggtgcgccgggagccccgccgtccatggaggcactgtcccagggtgtgccgtcgccctgagccccgccgtccatggaggcactgtcccagggtgtgccgtcgccctgagccccgccgtccatggaggcactgtcccagggtgtgccgtcgccctgagccccgccgtccatggaggcactgtcccacggtgcgctcctccttagaggtctctgcactctgcctttgctgcccacactctccaggagcaccttagttggatctttacttccttactgcctctcttgccacgcgaatccttgagtcacttataagacactccacgttgatcattttcatttgtcctgtttccagagtgtttatgaacacaattttacttgccaaatctggtttccatgttggactagaggaactagagggcaggacttgctggatcaaatttttacttccattttatgacatcccacaggactcataagacttcatgtcccccagattatttgatcttcaacagctgtcaatccagctaacttttatctgacacataataggtgctcaataaacatttgttagctgactatctgctaaagcaaaattgatctgatctcagcatcccctgctttaaaatctcctctagttcccccttctctttgggttctgaccacagcttgcaaggctgtttgaaatctacccccgcctcttacaatttcacctcccaaaacttgcttctaacctttgttccagctacacccaattttgtaccacatcctgagttgtttcttgtcactggtgctgtataaggtgagttgaccatgatcctagtggaaccttagcagcaggtaagaggagaaagctgataatgggcgaagctggggggaatttggtcagcgaagttagtgtctcaaagcaacacttaattggggaggtactgatatgatagacaggtgtctgagctggtgcttggggcagggcagccagtgggatctgcagaaggtcttggtgctgtcttgattaaaggggtacgaggaagcactccaaacaaggcactgcaaggccacaatgtggggacagggcccaggccagccccagagagcaaaatcacaaaagacaaactgctttggccaatggagttgagggaacgctggaagagcttggtggacatggacttggggcactggactgacgtcagatccccctgtgctactaagatagtggtgtcacttcataaacttttttttttttagacagaatctcactctgtcgcccaggctggagtgcagcgacaccatctcggctcactgcaaccttcgcctcctgagctcaagcagttctcctgcctcagcctcccgagtagctgggattacaggcgcccaccatgcccggctaattttttgtatttttaatagagacagggtttcaccatgttggccaggctggtcttgaactcccaacctcaagtgctccacccaccttggcctcccaaactgctgggattacaggcatgagccaccgcgcctggccccatcgtaaacatttaactcacgaattcagttatctgtgctcagcaaacatgcacaaaaaggcaaaaaagcataagggttccatccccaaactgcactcagggattgcacagcctagagtgtgggaagatgtgagaacagagaatctgttttctcatttgggaagctactacatggcttctaacccaagccagagacttcacgtcgtgctcaactgaagaacaaggatgttttcctgtgcctgatgaagaactatccagacaattcactgaagaggataaacaggtggcaaataagcacataaaaagattatcaacacccttagccattagggaaatgcaagttaaaaccacaatgagaaattaccacacacttctgagaatggctatcatttttctctattgagaatgcagagatgctggatcactcacacatcgcagggggagaatgtcaaatgatatcaccacttcgagaaaatcatctggcaatttcttctaaaactaaacatgcacttaccatttgacccagcaactgtactcttaggcatttgtcccaaataaatgaaacctgtatccatgcaagacctgtacatgaatgttcatagcagctttcataagagccccaaactgtaaacaacccaaatgtccttcagtgagtcattagttaaattttgatacatccatatcctgaaatactagtcggcaataaaaaaggataaactattagatggataatagagaaaaagatccagactcaaacaggtatatgctgtataattccatttacataaccttcttgaaataacaaaaacatggagctggagaacagaatcctgggtgccaaggcttagggaaaggagggagggagtgggcgtggctataaagaagcagcagcacaggccccttgtgatgaaacagttttgtatcttgattgtagcagtggttgcatgaatctacatataggataaagtcatatagaattgtgcatgtgtgcacacatgcacacacacatatatgccatgtgtgtaaaactagtgaaatctgaatcagctctatggatggtcccaatgtcagtttcctggtttggatattacattatagttatagaagatgttactgtctggggaaactgggtgagggatacaggggacttccctatatgtatattttttgcaacttcctgtgaatctataattattccaaagtaaaaagctaaacaatgaaactggccaggagacagcctgctggcttccaacctggcagctccctaggggattctcatgagtagtttccactgtacataacttcatgcatggacccctcataagatgggactcctcttttgaagcacaagtgcgtatccacgctttgttcaagcggattgacttccctgggatgctgctgccgtgtcctcatgcatcccgctgggaggacactcatttccccattcactgggaagagactcttttggacgaggtcaggtgtttggtcacagggacctttggtaatctgaaatgtccttttagtttatttaaaacatttttgtgcaaacatgtagtatttaatttctttctttttttccttcttttttttttttttttgagatggaacctcactctgtcatccaggctagagtgcagtggcgcaatctcagctcactgcaacctccacctcccaggctcaaccgattctcctgcctacaagcgtgtgagctgagattgcgccactgcactctagcctgggtgacagagtgagattccatctcaaaaagaaaaaaccccgtcacaagtgtgagccaccgcacctgcccagatctcctttttaagaacagcaaaaagacagggtttcaccatgttggtcaggctggtcttgaactcttgacctcatgatccacccgcctcagcctcccaaagtgctgggattacagtcgtgagccacagcacccagctacatttaattttttattgatatgcaacatgcatatagaaatgcacacggaaacagtcacgaaggcttgatgagatttactcatataactgagaagtagaactagcttcactcatgcccagacggtaactttctcctttccttcctttccaaaggtaaccaagttaacattgtaggtgaattgtgtctatttatacaagtattttactgcacaatttttaagcataaaaataaaatcatagaatagacctgtcgcccagcttcaacaactgctaaccctgtgtgaaatggccttttaaccaaacatatttgtaatacgttgacctaggctatgttcctaagtgtcttttgaaacccagggacagaaactaggcttccaaatgttgagagctgtctatgtgccaggcaaagttgtgagtgcttcacaccgctgtcttacataactctcccaacaaccgtatgtggtcattactcttctctctcttccaggtgatgaaatttagacacagagaggctatgtaacttgccccaggccacacagctagtatctggcagaggtgggtttcaaacccaggcactctggctccagagcctgagcatttaacctcttaaccttagcaacactttcaatttcatccaagtgattggttccatcaagcatagaagataccagatgtggtagagggaggagacagaattctttccagacactgccatttgagagcaatgcaccatagcaaagtggttagatacttgaactttggggtaaattgcacctagattctagtcccccactacacacacagacagctgtgtgaccacagggaaattgcttaacctctctatgccccagtttcccttgtataaaatgaggctactaacagcgctgttaacataggattgcttgagggtaaaaaaaaaaaaagtgcacaaagctgttagcataagtgaaatacttagcatagtgcaatactcataatgctcattgctcataaatgttaactattatgattaatgaatggacacctggcccttcaagagagaaattttgctcttgggttctgggtggtagcttggggaggggggccgcttctgcatgagcactgttgtataaaagagggcaatttctgatccttggtgaaaaacaaaggtgccatctaggagtcccattgtttgaaagtaagtccgtgcccttcaaagcttggaagccatctgattaacatgtcacctctgaaaccaaggcggaggaggggactgtttcaagcattctacctatatgtgacagggaccctggggaggaccgcctgcaaggatggcagagatgccacggcaaactcattcttaaactatccaagaagctacaaaggagggttttggagtgaaactgatggataaccctactctctcccaatattcttcttaggaatatgttgaagatttgggttcagcttcctagaaaacaaaaggaaactcttgttttttctggcacctctctgatctcatcacctatgacctaccttccccacccccacttcctgccatctctgtccgcaccattctctctgcttccccacaccaggcacccgcccatctcggggcctttgcacctgctcttcccttggccagaactctcctttccaggcagccaggggttcgttgccttaggtctttcctctgttacctccaaagtgagccttgcttgactgccctctacaacagtgagcattaggatttttcaacattaaacccaacaacacttttaataacactttatttagatgtagttcacataccataaccaagagaacacctcatctagttttatggactgtattttgtggattctaaagtgcatttttttctggtttttttttttttttttttttttttttaagacaggattttgctctgttgcccaggctgtggtgtagcggtgcaatcatagctcactgcagcctcgacctcctgggctccccgctcagcctcctgagtagctgagacaacagccatgcaccatgacacccggctaattggtttattttttgtagagatggggtctcactattttttgcccaggctggtctcaaactcctgggctcaagcgatcctcccaccttgctctcccaaagtgttataggtgtgagccaccatgcccagcctttttgcagttttaacgtctctgacatcaggatgcagcttacagtgatagcatgtcatagtctacacggcagtgttttattttttctttcttagtgatacataaaatgatggtgtaccttaaaattgaaggactctttgaatcaatgaaatatggtacccaaagtcttcataatcatttattctcaagaactccaagtacagatttcagctggacagttagtaaagatgtaaagtacattcttgaacccccatttggggttagataacactggggtgtgttgtaaggtattgaatctgcagttgcttctaagttcatgtgtattggacggtgggaatttttttcattaatgtataattcttaccattctttttagaattgcctttcttcttttctgttcctgcttctctaatgcttgctgggggatttcttttcttttgagaatgttaaaaacaataataatgaaaaaatttcacagtgactccgtctttgaacactgctatcaaggtgagcgtctagtggaaatttggggcttgctgggctgccacaggcagtttgcatttaaacaaactgtggctttgatttaagaatctaacttgataggtaatatatctaaagcagaaaataatatatacactgtttctatccgaattatcaagttctttgtgcaacgtgtttatttctctgagtgattatgcatttaataaataatgtgtttcaatgggtattattttcatttcagtgtttaatacttctacaatatgtctcaggttcggggttgaatggcacctgataaattacgagctgttattagctgctttcttgttgcatcttaattattaggttgaaaagaaagggcagacttttataagcattcatattttctgtttacaaggcttttactgacgtctactaaatttaattacctctaataagaagaggaaatgaagttctatttagcaaatccatagctttgaaactcatcttgtagctttatgagcatggcaagctccaggaaggtgaaagctatttaaggagctgttgctgggttaaactaactgcaaaactgttaaattatttttgtttccattttattgcttaacctccagggtaaacttcggactacctgataaagcagccactccggaactttaaactttacatgctttaccccacagggccaaagcgggctcctgtattaaaggtacatttttcaaacataattttaaatttggaaattgattgtgtcttgacctacttatttccaagagctgttcatttctgactcctttgttttgctcatattataaatctattgttctttcaggagggctcccagctgctgagggggtggagggaggaatcagtgcagggaagatgagctcattctgccagcaccaccatcatttgaatcagacccacaactaactgggactccagctgcagataaaacacctcaggtctgcgagcgtccacttctgacagaggggctaggacagaaagaagactgctggcttagaagggttgtgtttggggaaagagggatcctacaaaatatttaaaggcttattttatagggcatcagatagttaatttggatttattttttggtccaatatcttcccagataatactttataagtgtctaggtttccatttattgtagtctactggcagacagacccttggcagaaaaaccatgctacttagtgatagctctttcttttcgtggtctttctttaaaacctaaaaacaagccaggtattaacaggaaggtcttgtgaaagaatgatcatctctgaaaggtgtccccagtcctgaggcctgctctcactgggacagctgttctgctctgaggagctgcctgggggctgtcctcagctccttcttggtcctcatcacacgctccccttccctccagccgaggggtcgcatcctccaggagtttaagatgagcctaggcatcacagcaagacccccatctttaaagaaaataaaaataaaaattagcccagtgtggtggtccctgcctggagtcctagctacctagggggctgagatgggaggatcactggagcctagaaaattgaggctgcagtgagctacggtcgcactgctgcactccagcctaggcaacagagtgagaccttgaaaaaaaaaaaggtagagaagaaaaagaaagaagaaagaaagaaagagagagagagaagaaagaaaaaagaaagaaaagaaagaaagaagaaagaaagaaaaagaaggaaagaaaaagagaaagaaagaaagaatgaaagagaaagagaagaaagaaaaaatatacagaaaaaaatttattttctttagagatggggtattgctttctgcctataagcttctggcctcaagtaatcctcctgccttgtgctgggagtataggtatgagccattgcacctggcctttgagcatatgcatctttgccatttcaatttctttttttgagaattgcctgttcagatctttcaacatttaaaaaatctcactcctttttttattgatttgtgggagcactttgtatatggtggagccactgcacctggcctttgagcatattttaaatgcatatttgccatttcaatttctttttttgagaattgcctgttcagatctttcaatgtttaaaaaatctcagtccttttttttattgatttgtgggagctctttgtatgttgtggatattatccccctctctgttatgtgtcacaagtattgttttccagtctattatttgtctttgaatgctgttcatggtatctttttatatttatagtatcttatacaagcattttttatatagtcaaatctgttcatgttttctattattgcttcttgtttttctcttataagatctttccatcacaaattactctttgttttctctaggcattttttttgttttatgcctttatcttcaattttttaattcatctcacattgattttggtgaataatgtgagaggaggttctggttctttctccccaccatgtcccccacagatatatttagttgccttaacaccagtcaatggatgatcaatacttctaaaactgatttggaaatttctctctttaatattttaacttctttttttaatttttgagacagggtcttgctctgtcactcagtctggagtgcagtggagtgattatggctcactacagcctcaatctcccaggctcaactgatcctcctgccttagcctcctgagtggctgtgtgtaccaccatgcctagctatttttttaaaaaaatattttttgagaaacaaggtctcactatgttgcccaggctgatcttgaactcctgagctcaagtgatcttcttgccttggcctcctgaagtgctgagattgcaggcatgagccactgtgctggccctaacttctaatttttaaaggagactcatcttgagcatgcttaaagatctggaagaaggatccagtatatagcatgaggttgaagaattcaggagaactcaaagaatgctggaagaagtcttggttctagaaaatgggagggaattagaccagagaacaaagattcatcttgaaggaggctggagggaaggaggtgaggatggatgtcccatggataacacataggtgagatgatgggagttggaggagttaacatctaaagactccatttttgtgatgaaggggcatgcggccatttgctgagagcagcaggagaattggacatttgtagaaagcaaatgtctgactcatcacggaggttttcgttaaagcaagatgggaagggtccagaagaatggtggggtttgtcaaatatgtctaatctaagtgtgtttcatcacctccaccaatacaccccagtgcatcctcttacgtggattgctgcagtggtcccacacaggcagggacgggtgtctgtcttgttcactgcttcatctctgcaatctaggacagtgcctagcacataggaaacatttattaagcacttattgaatacatgaatggatactgggaagcttttttgctatggaacgaaggttctggaggacacaatggaatgagtgtggagatgagaagataggccggggaagatacagatgagaagcatgctgggactttgggcagctacaaggcagagctgaggtgtgatcacagtcctggggaagctacagatgggttgccccaattcagcatgtgctcaagattccaaataagaggctgccagagacaagttcttattcctcttttagcggggcaggaaggggacttgctggctctgggggcatttgtcttccctgggttaccagtagatcctcagagcctggctgccctggtcatcatgtgaagtagctgaagagtgtcttaggtggcaagtgaccagggccccaaagaagcccttgcctgggtggctggggagagaggattggctgccatggaagaccacacaccatgatagtggtggacaggcaggggtgacttagtgactgaaccttcccttgacagaagcagaaaccatctgtgatgtcgagaagtgaccgagcccacaaagaaggctctgtctagattgtaaacctacaaaaacatttttggaatgaatgagtgattagatggctgaatgaacagttgtataacagatggacattttccatttcaaagggaatggagtccaatgggatttcctctggactatcccacttacttctccagtaatcattagtgcggtttgtcaaagacttctgtcttcccaccttctgagaacatggtaagattgcacttcccagccttaggtaggacacatgatgagttctggcccaagagttttgagcagaagtatcgtgggttgtgttcaaaccaaagaatttacttgctggtgcaagaactttggacatctttttctctgtcgtgtgctgctctgttagctggagtccctggatgagtaggaggagcccctttgacaacccatgacggaccaatagcatgagtgagaaacatggggggtgcttgttacctagcataacttagtctagcccaactgacacaccttctcatctaatctgaactccaattataactattcctagaggaaagaaaaaggaagcctagttttcagttaccaaatttcttttctttcctttgtaaaaaatttttttgtggtaaaaaatatgtataacatttatcatttgtttaggccgggtgcagtggctcatgcctgtaatcccagcactttgggaggccaaggcagacagatcacctgagatcaggagttcaagaccagcctggccaacatggtgaaaccccatctctactgaaaaaacaaaaaacaccaaaattagccagtcatggtggtgggcacctgtaatcccagctactcaggaggatgaggcaggagaattgcttaaacctgggaggtggaggttgcagtgaactgagatcgtgccattgcattacagcctgggagacaagagtgaaactccatctcaaaaaaatatatatatcattattaatatttttaagtgtactactcaatgaaatcaaatacattcacatggttgtgcacccatcaccactatacatctccaaaactgtttttatcttctcattctgaactttgtacccatcaaggaataatccccattcccccatccctccaaccgctggtaaccactgttctccttcctgtctctgtgaatttgtctattctaagcacctcatgtaagtggaattgaatagtatttgtccttttgtgtctggcatattatgcttagcacaatatcttcaaggttcctctccattgcagcatgtatcagaatttcattctgttttaaggctgaatcatgtgctactgtatattttgttccatatactacattttgtttgtccattcatcttcaatggacattgagggttgtttccatcttttggctactgtgaataatgctgctatgaaaatgggtgtacagagacttgttcgaatccttgcttccaattcttttgtgtatgtaaccagaaatggaagtgctgggtcctatggtgattctatgtttgatttctaagggtccatcgtactgtttcccacagcagccaggcacgtgggttccaatttctccatcctcaccaacatttgttttctgttctgttttgtttttttatgatagtcatcctagttgacatgaagtgatgtctcactgtggacctgatggtgtcttctcaaccctttctttgccaagtaggaatgaagccatagttatccctgtctctgcaggtcagaaaaatacatccagtttgactctaggtagaaaagcaccccttgacacaattaggtcatgaatgaattcaggcttttctacctcttcttcctgtgtcttatgctcctttccaaatgcccctttgaacaatccctgttcctcactgaggacctcatttacactaacaagagactgagacctcccagaaatgtttgctgtttaaacacagggagggaggaatacattgccaatggcgcaagttcaaaatcccatgaggaaatattttgggggtgggaaacccctgaaattgaatgccatggataataatgcctcccaagaaggatgccctatccccacaagccacatcctgagtcacagctctacctattcctcgtgctgctgtttgatttactgtatttggagttaggctttcctggatgtgctatttaagtgacagcatgattctatgactttacccagaagtttccctgggaacccataaagcccga

SEQ ID NO: 5692 - DNA, 138250 bp, Homo sapiens
  CDH1 gene - 67328696 - 67426945 of chr16; NCBI Entrez Gene ID: 999; Build 35; sequence includes 20,000 bases upstream of initiation codon and 20,000 bases downstream of termination codon of the gene
attgaaaagactggcaacataccaaaggctaacaaggatgtggagcaactagaagtctcatgcattgctgacggcattataaaatggtatggccacagctgtggcctagatgtgtttgtccccaaccaaactcatgttgaaatttagttgtcagtgtaacagtgttaggaagcagtgccttaaagttgtgattaggtcaggccgagcgcggtggctcacgcttgtaattccagcgctttgggaggccgaggcgggcagatcacttgaggtcaggagttcgagaccagcctggccaacatggtgaaaccccgtctctactaaaagtacaaaaattagccgggcgtggtggcaggcacctgtaatcccagctactcgggaggctgaggcaggagaatcgcttgaacctgggagttagacgttgcagtgagttgagatggcgccattgcactccagcctgggggataagagcgagacatcctctaaagaaaaaaaaaaaaaagaaagatgtgattaggtcattaagatagatttatatctttctcagagactgggttattgtgcctgcttccacctccacttttccccatgagttaaagcagcaccaggccttcactatatgagctgcccagtcttggacttcccagactccagaatcatgagctaaataaactttttctttttccttttcttttctttttttctttttgagacagagtctcattctgttgcccaggctggagttgcccaggctggagttgcccagactggagtgcagtggcacaatcatggctcactgcaatctctgcccccaggttcaagtgatcctcctacctcagcctcctgggtagctaggactacaggcacgtgccactctggctagtttttgtattttttctagagatagattttgccatgttgcccaggctgatctcaaacttctgagctcaagtgatcctcccacctcagcctcccaaagtgctgggattacaggtgtgagccaccgaactggctaaactttttttgtgtgttaaattacccagtgtcaggaattctgttatagcaacgtaaaacagactaagacagccactttgaaaaacagtttggctggctgggtgtggtggctcatgcctataatcccagcactttgggaggccgaggcgggtggatcatctgaggtcaggagttcaaaaccagcctggccaagatgtcaaaaacccatctctactaaaaatacaaaaaaattagccaggtgtggtggcgcatgcctgtaaccccagctactcgggaggctgagacaacaaaatcgcttgaacccgggaggtggaggttgcagtgagccgagattgctccactgcactccatcctgggcaacagaatgagactctgtctcaaaaaaataaaaataaaaaaggaaaacagtttggcaatctcttagaaagcataaacatatgctaaccatatgatttagtaactctgctcctaggtatttacccaagaagaatgaaaacatatgtccacacaaagacgcatacatgttcctagaagctttatttataatagccccaaagaggaaatagcccaagtgctcattaactggtaaatggatacaacaattaattgtggtgtagctatacaataatggaagactattaagaaaaaaaacggggccgggcgcggtggctccctcacgcctgtaatcccagcactttgggaggccaaggcaggtggatcacctgaggtcagcagttcaagaccagcctagccaacatggtgaaaccccgtctctactaaaaatacaaaattagctgggcgtggtggtgcacgcctgtaatcccagctacttgggaggctgagacagggagaattgcttgaacccaggaggtggaggttgcagtgagtggagattgtgccattgcactccagcctgggcaaaaaagagtgagactccgtctcaaaaaaaaagaaaaaaaaaaaagataaaaaacgaactatgaactacagacatacacaacaatatgctcaaaagcattttgctaagtgaaagaaacatatacaacaggccacatactgtatgattccatttatatgacaatctagaaaaagcaaaactctggggacagaaaagggcccagtggttgtcggggaccaggaatgaggggtgtggtcatctacaagggcacagggggattttttggcatgatggaactgttctttttttttttttttttttttttgagagggagtctcgctctgtcacccaggctggagtgcagtggcgccatcttggctcactgcaacctctgcctcccgggttcaagcaaaattctcctgcctcagcctcccaagtagctgggacctcaggcacacaccagctaatttttgtatttttattagagacggggtttcaccatattggccaggctgatctcaaactcctgacctcgtgatccgcccatcttggcctcccaaagtgctgggattgcaggcgtgagccaccacacccagagatggaactgtactacatcttgattatagtggtggatatacaactgcttgtgtctgtcaaaactcacagaacttggccagatgcagtggctcatgcatgtaatcccaacactttgggaggctgaggagggaggatcccttgagcctaggagttcaagaccagcctgggcaacatagtgaaacctcttctctacaaaaaatgaacaaaattagccaggcatggtggcatgcccacctgtggtcccagctacttgggaggctgaggtgggaggatctcttgagcccaggaggtcgaggctgcagtaagccatgatcacaccactgcataccagcttgggtgccagagtgaaaccctgtctcaagaaaaaactccaaaccaaaccaaaacaaaaaacctcacagaactgaatcccaaaaagtgtgaattttaccatatgcaaactaattttttttaacatgaggggaggctaaaaaaaaaaaagagaaagaaagagagcgtgagatctgtgaaattctgggtagcaagggaattccccatgcataccctgaatcagatctttgcagaacctcttaaaatctaaagtttgtcaagcccagcctgacagctgtgtctgggacttgctggtgaccttgggcaagtacctttgcctcccagaaacatagtttcttagcccagaaagggaagagagagctctaaacatctctaacaaggcacagacatctattgagcactgagtcactgccaggctacccatacatgtgttttttcacatcagaagggtagggcaagacaatagtgttttaaatgttctttattaagtctttttttttttttttgagatggagtctcgctctgttgcccaggccggaatgcagtggcacgatctcagttcactgcaacatctgcctcccaggctcaagcgattctcctgcctcagcctcccaagcccgagtagctgggattacaggagcctgccaccacgccgactaatttttgtattattagtagagatgggttttaccatgttagccaggctggtctcgaactcttgacctcaagtgatccaccctcctcggcctcccaaagtgctgggattacaggcatgagccaccatgtcaggcctttattgagcatttagatgtattaagcactttgcaggtattagttcatttcatccttataccactcctagatggtaggaactagcactacctctattttactaattgacaagaacctaggtgcgcagaggtttcataaattgtcaaggtcaacatagcccagtatccccagtatttgatccagccctctcatttcagggcccatgctcctaatcatcatactaaatcatgtgacattcctggagacaagctgtgtgacatcctctcagcatctcagtgttcctggaccttaccctttatgcagtttagtcttttttttttttttttttttgagatggagtctcgctgttgtcggcctgggctggagtgcagtagcacgatctcggctcactgcaacctctgcctcccagtttccagcaattctcctgcctcagcctcccgagttgctgagattacaggtgtctgccaccaggtctggctaatttttgtatttttagtagagacggggtttcaccatattggccaggctggtctcgaactcctaacctcagatgatcaacccgccttggcctcccaaagtgctgggattaaaggcatgagccaccgcacccggccacagttcagtcttttaactgcgggtactcagcagttagggattacaggtgtgagccactatgcccagccccttccctgctcttgggtctaacctcctgcctctcccttcttggctagactaagctcttctcccttctgggcctttgcccaggtggtgacttctgccagaaacactggttaactcagcttaaatgtcactttgctccccatcatatttctgaaactccgtctcaaaacaaaataataatacataattgttaagatcatccttgttggccaggcgtggtggctcacgcctgtaattctagcactttgggaggctgaggcgggcagatcacttgacgtcaggagttcgagaccagcctggccaacatggtgaaaccctatctctactaaaaatacaaaagttagctgggtgtgtggcgggtgcctgtaactccagctactcaggagactgaggcaggagaattgcttgaacctgggaggcagaagttgcagtgagccgagatggcactactgcactccaacctgggtgataagcaagactaccaacaacaacaacatcaacaacaacaaaaggattatccttgcttattgctctgggttgtaaatccttgggttgtaaatccctggctcccttgtctgtttattccatcagatcaaaagcttcttcaggatagggaggggcccctgtcaccagccaagcatttgtgcatgctaggtgccagtgagtgtttattgaatgaatgaatgaatgaatgaacgagtgagtgagtgagttaatgtggcctgaaaagttggacagttactctggagaattatagatgcctcgtcctgtatctggactctggaattttctaggcctcattggaacccttgtcctttgcccaggttttattgctctgcaggtctccaccctggcaggaagctcttgccaccggctacagtctggatccagcctggccagttccacctttcccacctacaacacctggcaagaccaagacacagcccttccacaaatacatgagtacatgagcacgtggggtggacaagccatccaatcagtcctcactgactctggtaagggaacaaacttctcccagtttacctgggattttcatggttttagcactgaaagtcttacacccccagagacccaggatcccagacaaataggggcagttggtagcaccgggtttgttgggtcatctttgtggacagtggagggagtgggaccttcaacacagatttatttatttatttattttttgagacgggtttcgctcttgttgctcaggctggagtggaatggaatggcgtgatctcggctcactgcaatctctgcctcccaggttccagggattctcctgcctcagctccctgagtagctgggattacaggcacccaccaccaggcccggctaatttttgtatttttagtagagacacggtttcaccacgttggcccagctggctttgaaatcctgacctcaggtgatccgctgcctctattacttttttttttttttatcttttagagataatatttgacatataaagagaataaatgtatcacatatataaattataaagtataataatatagcgaataattatgaactcaccactcagcccaattctccttctccagagaagtacttgttagaagatgaggaatttaatgtccttctcaagcttcctggcttccctctcaagcaattcccaatttttaatagttatatattattcataacatttacattttgttctatagctataattaaatcttctgtactttgtctggaggttgagtctaaatactgaaaagcaataaacagcatcatgattccgtaaacaccccttgcttgagaactcctggtccccaaaaggaaaaaatgggatcctgtgcagtgccagttttcaatctcaagaagctcaatatcatggttcttagaggcagaagagatctcaagcctccttctagctaactgagtcattttacagaagataaattgagagttagagaaggaaataaattttgcttcaagtcataagactcgtcaattccttacactatgttctggcctcctcctgggatttcgtaaataaatgaggccagacacggtggctcacgcctgtaatctcagcactttgggaggccaaggtgggtggatcacttgagtttgagaccagcctggccaacatagcaaaaccctgtctctactgaaaatacaaaaattagccgggtgtgaggccgggcgcggtggctcacgcctgtaatcccagcactttgggaggccgaggtgggtggatcacaaggtcaggagatcgagaccatcccggctaaaacggtgaaaccccgtctctactaaaaatacaaaaaattagccgggcatagtggcgggtgcctgtagtcccagctacttgggaggctgaggcaggagaatggcgtgaacccgggaggcggagcttgcagtgagccgagatcgggccactgcactccagcctgggcgacagagcgagactccgtctcaaaaaaaaaaaaaaaaaattagccgggtgtggtggcgcacaccgtaatcccagctacttgggaggctgaggcaggagaatcgcttgaacctaggaggtggaggttgcagtgagccaagactgcgccactgcactccagcctgggcgacagagcaagactctgtctcaaaaaagtaaataaaaataaataaatgatgttagctgcaaagtcccttttttgaagggaatttagactatatagactttacatcaaggattcaaggacctacagctgggcacattggctcacacctgtaatcccaccagtttgggaggccaaggaaggaggatcacttgagaccaggagttcaagaccagcctgggcaacatagtgagcacctgactgtacagaaaataaaaaattaaaaacttagccaggcatggtggcacatacctgttagtctcagctactcgggaggctgacgcaggagaatcacttgggcccaggagttcaaggttgcagtgagctatgatcccaccactgcattccagcctgagcaacagaggcgagaccctattatttaaaaaaaaaaaaaatggtctcgagacctgtcaattccccacactacgttgtctggccacctcctgggatgtgatacatgaataaataaatggtgttagccacaaagtccctttttttgaaagggaattaatctatatggatgtcacatcaaggattcaacgggcatacactaagaaaatgaagtattttaatgacagcaggtaaaatcagagagccctttgtctccaaacatctttggtgtggggctaggctgaacttggcagggagtggtttcattggctgccgagccagcagagggttggttggggaagggtttatctctccgtcccaagtagacagagttctggcacctgattcccttgctctgagaagagggtggggccttctttgcttggaagcgggggacaggaagcaacaggtccctgggcctccacagttatgaactgcagcaccttatctattgttcttgagatgccaggtccaaaggtatctgagcagtgggaggacacccagtcagccacagggctccatgacagcagccccactttccagggggcttaactcactccacttaagttggaggggcctgctgcccatggacttggttcaggaaaaatcttgtcccctgagtaatgtggaatatggaaataatagttcacgttgatttgcactcccgtctgccatgtttagttaggttatttcacccaattctttttttttttgagacagagtctcactctgtcgcccaggctggagtgcagtggcccgatctcggctcactgcaagctctgcctccagggttcacgccattctcctgcctcagtctccggagtagctgggactacaggcgcccgccaccacgcctggctaattttttgtatttttagtagagacggggtttcaccatgttagccaggatggtctcgatctcctgacctcctgatccacccgccttggcctcccaaagtgcagggattacaggcgtgagccaccgcgcccggcccttcacctaattcttgaaatcactcaacaaagtaggttccattattattctcagttgtacagataaggaaattagaagtccaaagagtctgtggctctgactcaaaggcttattactagcaggtagaaaagtaggattcaggccagcatggtggctcacacctgtaatcccagcactttgggaggctgaggtgggtggattgcttgagcccaggagctggagaccagccagggaaacatggtgaaatactgtctctacaaaaaaatacctaaattagctgggcatggtgggacatgcctgtagtcccagctactcaagaggctgaggtggaaggatcgcttgagcccaggaggcagacggaggttgcagtgagctgagattgcactactgcactccagcctgaccttgtctcaaaaaaaagaaaagaaaaagaaaaaagaagggcagaattcagaagcaggcagtcaggaactgaagtctatgctgggaaccactgtgccaggatggtcttaagccagaacaccagcctccctgcctctgccatgaaactggtcgttcatttctctaagcctcagtcacctcttctgggaaatggggatgattgtgtctgctctataggctggccagaggaccaaatgcccctctggttccagccctggtcacctgctcccctgacctgtggctgtcatgggagctcttgctgggctggacaacagggagctcaggccatcctcttgccttccttctcttggctgccccggagtctggaatttcaggtccccgcaaaagactatttcttgctaaattaagcaaggtttgccactcagttcaaatggcacccagaaacaaaaccccaccctgatcttagtggaatagcacagagattaagagactgcagagggcagtggcccagggttcaaattccagctctttcatttttttggttgtttttttttttttttttgagacagagtctcgctctgtcacccaggctggagtgcagtggtgtgatcttggctcactgcaacctccgcctcccgggttcacgccattctcctgcctcagcctcctgagtagctgggactacaggcgcccaccaccacgcctggctaattttttggtatttttagtagagacggggtatcaccaggttagccaggatggtctcgatctcctgaccttgtgatctgcctgccttggcctcccaaagtgctgggattacaggcatgagccaccgcgcccgccccagctgtgtcatttttattgtgtgtgatggtgacttttaggtgtcaacttgactggattaagggatacccagatagctcataaagcattatttctgtgtatgtctgggaggacgtttcctgaagagactgctatttgaatcagtggactgagtgaggaaaagtcacccacacccacgtggatgggcaccattcagtctactgagggccaggatagaacaaaaaggcaggcaggaaaggtgaattcactcactttctctctctctcttcttctagagctgggacacctgccttctgcccttaaacatcagaactccagggtctctcgccttttgactctgggatttgtaccagcagccccccagtgttctcaggccttcagcctgggactgaaagtcttggattgggcaatgctaccagcttcctggttctccagcttgtagatggcttatcctaggacttctcagcctccataatcccatgagtcaatttccctaataagtcccctctcatctctctctgtatatatcctatttgttctgttcttgggagaaccctgactaatacactgtgtaacatcaggccaatccctttacttctctgtgagtctctgcttccaaatctgtaaaatggtcacgcctgtagacctagcactttgggaggccgagacgagtggatcacttgaggccaggggttcacaactagcctaggcaacataatgagtcctcatctctaataaaaaacaaacagggctcggtgcggtggctcatgcctgtaatcccagcactttcagaagccaaggtgggtagatcacctgaggtcaggagttctagaccagcctggccaacatggtgaaaccccatctgtactaaaaataaaaaaattagccaggcgtggtagtgcatgcctgtaatcccagctactcaggagactgagacaggagaatcgcttgaaatcggaaggcagaggttgcaatgagccgagatcacgccactgcactccagcctgggagaaagagcaaaactccatctccaaaaacaacaacaacaaaaccccaaaatctgtacaatgtatgtatgtattatagcaaacggctgtatgaagactggtgagacaaggcgtactatagtgcactccaataaatagtagctatcacttttatcatacattataatgcaattattggcatccagcacaaagcctgatacataattggctttcaataaataataaataaaacgataagtgtttacttgtctccatcccacagtaccttatgaggttttttgtttgtttgtttgttttttgagacggagtcttgctctgtcacccaggctggagcgcagtggcacgatctcggctcactgcaagctccgcctcccgggttcctgccattctcctgcctcagcctccggagcagctgggactgcaggcgcccgccaccacgcccagctaattttttgtatttttagtagagaaggggtttcaccgtgttagccaggatggtctcgatctcctgacctcgtcatctgcccgcctcggcctcccaaagtgctgggattgacaggcgtgagccaccgcgcctggccttgtattttcaatagagatggggtttcaccaagttggccaggctgatctcgaactcctgacctcaagtgatctgcctgcctcagcctcccaaagtgatgggatgacaggcttgagccaccacgcccagccccttatgagcttcttaaaggcagggaccgtattttgtttatctctttgttcctagtgttaaacagaatgcttggcacatgggagtggttaatgaatgtttgttgtttgagctaatggatgggaacagccatcatccacagtgctaaaaccacaaggtgaaggggctgatggagaatttgataatggagagatctgctgacacctacagaagcttagcatcctgaaagtgaatcagcaagagagcttcttgcttcctgatacaatgctatgggagcgcccggcaacacttataaaatatttttgcctaaaatactgatctgaatcaaggcaagcctgtatatctcagtagtagttcatgttacatgtgggattgaggaacgcgtttaaggacacctcaaagatgcattcaaccaaaaacaaaatgcagggctgggcacagtggctcacacctgtaatcccagcactttgggaggctgaggcaggcagatcagttgaggtcaggagttcgagaccagcctggccaacatgatgaaaccccgtctctactaaaaatacaaaaattagctgctcatggtggtgctggcctgtagtcccagctactggggaggctgacgcaggagaattgcttgaacccgggaggcggaggttgcagtgagctgagactgcgccattgcattccagcctgggcgaaaaagtgagactccgtctcagaaaaatatatatatgccggacatcctacagaacaaatgaccctgtgtgttttttgttttgtttcgttttgttttttaaagaagtctgtaagtctggaattacatcaaaatagaaacaaacaaaggatacattcactatcatagttgtggtttcacagtgtatacaaataccaaaactcatcaaattgtatactttaaacatatgtagtcaattatacctcaaaaaagatgaacaaaaagggatggagaagcttataggtaaaaagagtcttaaggggcataacagacaaaagtaaaatgtggctcttgcttggatcttgattcaaacacatttttttatttgtctgagacagagtctcctctcttgcccggctggagtgcagtggcgtgatctcggctcactgcaacctcgacctcctgggctcaagtgactctcttacctcagcctccctagtagctgggaccacaggtgtgcgccaccacaccaggctattttttttttaattttttgtacagatggggtctccctatgctgctcaggctggtctgaactcctgagctcaagcagtcctcctgcctcgacctcctaaagtgctgggactacaggtgtgagccatcacgcccaacccaaactattaataattgtttgccaggtgcagtagctcatgcctgtaatcccatcactttgggaggccgaggcgggtggatcatgaggtcaggagttcgagaccagcctgaccaagatggtgaaaccctgtctctactaaaaatacaaaaattagctgggcttggtggtatgcgcctgtaatcccagctactcaggaggctgaggcaggaggaacgcttgcacctgggaggcggaggttgcagtgagctgagattgcaccactgcactccagcctgggcaacagagagagactccacctaaaaaaaaaaaaaagccgggcacggtggctcatgcctgtaatcccagcactttgggaggctgaggcgggcggatcacttgaggtcgggagttggagacctgcctgaccaacatgcagaaaccccgtctctactaaaaccacaaaattagctgggtttggtggtacatgcctgtaatcctagctactcaggaggctgaggcaggagaattgcttgaacccaggagacggaagttgcgttgagccgagatcacgtcattgcacccagcctgggcaacaagagtgaaactctgtctcaaaaacaaaaacaaacaaacaaaaaaaattgtttaaaagacattttttaaaatgtggcttagccattcaatgatattgaggaactactgtgaattttattaggtgctttactaatggcatgggatcatgtttaaaagatgtctttctcagatatgcagactgagatatttacaggagaaatgttatctgggatttgctttaaaatattatttgggccgggtgtggtggctcacacctgtaatcccagcactttgggaggccaaggtgggcggatcacctgaggtcgggagttcgagaccaacctgaccaacatggagaaaccccgtctctactaaaaatacaaaattagccaggtgtggtggtgcatgcctgtagtcccagctactgaggaggctgaggcaggagaatggcttgaatccaagaggccgaggttgtggtgagccaagattttaccattgcactccagcctggacaacaagagggaaactccgtctcaaaaaaaaaaaaaaaaaaaaaaaaaaaatatatatatatatatatatatatatatataattataaaaatatatataattataaaatacatatataattataaaaaataattatatatatatattagggctggagttcaagaccaggatgaccaacatggtgaaaccctgtctctactaaaaatagaataattagccaggtgtggtggcgcatgcctgtaatcccagctacttgggaggctgaggcaggagaatggtttgaactcaggaggcagaggttgcagtgagccgagatcacgccattgcactccagcactccagcctgggcaacaagagtgaaactccgtctcaaaaaaaaaaaaaaaaaaaaaaaaaaaatatatatatatatatatacatatacacatatatacacatatatatacacacacacgtatatacacatatatatatacacacacacgtatatacacatatatatatacacacacacatatacacacacacacacacacacacacatatatatatatacaatttgggcgtgatggctcatgtttgtaatcccagcactttgggaggccaaggcaggtggattgtttgagctcaggagtttgagaccagcctgggcaacaagatgaaaccccgtctctacaaaaaatacaaaaattaacctggtgtggtggctcatgcctgccttctcagctacttgggaggctgaggtgggaggattggcttgagcccaggaggtaatggctgcagtgagccgagattgggccactgtactccagccggggtgacagagttagatcctgtctcaaaaacaaacaaacaaaaaattctgcaaagacaaaaataaaaatgcaaaggtagaaagatgaaagaagatttggtacaattacaaagtttacaaaaactttaaaaattgcaaaaaactactgttggggctgggtgatgaatacctgtggtttcattatactatatgtagtgtgtgttacactattttctttactttgtgtttgaaataaaactgtttttttttttttgcagactggaagggcggcacccctatcagttagcaccgtttcaactggaggcggtatagccagttcccgcccctccatgctggcaggcagcccagcccagcagaggtttcaggagcctctaggagcagcaggaagggagcctcctctaccctacctagccaggagcctgatcaggctgtaatccctagcaattccagtttctctggggattcctccccagtgggctggcggttggactcttctcagcagaggtctggagaggggcacctcccaccccaatctgaaccctatgactgcaccccttgccaggagatgaaagggacaagactgcctgaaggattaatctttagcctccaggcaggccagtggccaaaacacccaggaagtgaaagtctgtcctctgccataaggaaacctggagtctgtgatcccatcatgcggggtctgttatctgccaggtgacagggtctcttatctatctgcggtgatctgaagggcaaggcctctggccaaacatttcttttccccagtgatgcctgaaattccactgttagcgctggatctcagcaagatctcagagaaagctcaactcctggagtttgggttttccccagttgagatgttaggaaagcaatgggccttatcacctgcacggacaggtttgtgtacagtctcaggggattcagggaccccaccagagcccatccacagacaccaggttaaaagccctggacagcatttacaactcctttgaaagaagaaaagtctttctctagagccctctttaaagtgcaaatggccctgggaggttcgaaatgatgagctggccggcatgaaagaattttctccagtagatgcaagagataacctgaggagctttagtggcgggggtgggggaaggagagcctgggggaggggaggctccaggcagctcacaatttttcctagaactggaaagggaatgtattgggccaagagggctaatcactcacctttgcagagtgtttacaagaaccttatgaattaagtgctatcaacattcccattttacagatgaggaaaccaagatggtggagataaaatgacttatgcttctcaactaatggcagagccagaagtgaatccaggctggagtgaagtggctccagtgctcaaatgatcctcctacctcagcctccagagtagctgggactacaggcatgcactgccatgtccagctaattcaaaataatatttgttggggagatggggtttcaccatgttgcccagactggtctcaaactcctgggctcaagtaatcttctcacctcccaactagcctcccaaagtgctgcgattacagttgtgagccaccaggcctgcttaggtatccctgtttgatacaagagaaaacagagggcaggcacagtggctcacacctgtaatcccagcactttgggaggctgaggtaggtggatcacttgaggtcaggagtttgagaccagcctggccaacatggcgaaatcccgtctctactaaaatacaaaaattagccagacatggtgacgtgtgtctgtaatcacagctactcaggaggctgaggcacaagaatctcttgaacctgggaggcagagagtgcagtgagccgagatcgcgccattgcactccagccggggcaacagagcaagaccttgtcactaaataaataaataggaaacagagaagcaattcagtgtgttgcgaaagtcacacagcacctgtcttccacaaggagcccctctgtgttcccgcctcaccctggacacctgatctactgtctttggagcttggagaaggacttgccgagaagtctgaagaatgcatcaggcctgacctgactttgctgcccctaattgttttctaaaatcctttttattgaattatcagagtgtaatggaagagtcgatgagagtcgctgcagagttacgaggccaaggcttgctgggtagaagaaagtaaagccctaaaggctcccagggcccagcgatggtataaaatatgtatttttacataactgagaggaaaaaaataagcagacagtacagccccatgggggaaacgcctctttctgtatttccattatcttgttcaaggcacgatcctagtgggaaaggaaataccggagccttctccctctgagcctcctggtgggttaagagcagagggagccaaaatacgacatccaaaagacctgattggaaactcattaaaattgaggggacaggttgttggggggggcggtgctgggctgcccagaaatcgtctgcatttgagaaattacttgatggactcagaggcacctttagctctgggtgaaatattccaaacatggctttccccaggaggaagcgaaataggggctgggccttttgaaagagtaacccctactccaaatatttattgagcagttgctatgatgagccaagaactctgcttagcgattgtttttgtattagctcatgccaattcacttatacaaaggagaacactgacttccccaaggtcacagggctagtgagtggctgactccacttaatgctgtgtagttctaaccatgcttgaaggataaagggaaaggaggtgcccttgtcggggtagacaagccacccagacgtggctggccacagggagtcagacagggaagttgtctaacctaacatttgcctgtctattctgtttttgtcttttgatggaggacggcgggtgctggagggccactggcccaggacctgagacctttggcccctatctattctatttttgatcctaaaattatttcactggggacagaattctctggagaaggtgatggtggccatggtgtggctgtggcattaaaagccccactctgggggtcagaagatcctgggttttggtctttggctttgacattgacctgcctatgtgacattgaacaagttatttgcaaatcataggtttgggtgaactctaaaggtctcttccaggtcaacatcaaaaaacagactgaaaactgcagctccagctggaagactgggaccacatgagatgaagctgattgttagaagaaaggccctggaatcagagaggttggttccagtcctgcgccacctctcattggcctcaatctctctaagcttcagttgcccatctatcatatgggaataataatacagctcttgggttgttttgaaatgagcttaaatgagctggtcagtggctgggcacggtggctcatgcctgtaatcccagcactttgggaggctgaggcaggtggatcatctgaggacaggagttcaagaccagcctggccaacatgatgaaaccctgtctctactaaaaatacaaaaattagccagtcgtggtggcgcatgcctgtaatcccagctactcaggaggctgatagaggagaaccgcttgaacccaagaggcgaaggttgcagtgagccaagaacacaccattgcactccagcctgggcgacagagcaggactccgtctcaaaaaaaaaagagctggtcagtgtcaaatgcttagcacagagactggcacagtaatcttcaatgtccagcacctattgttactattttttttttttttttttttttgagacagagtcttgctctgtcgcccaggctggagtacagtggcgcgatctcggctcactgcaagctccacctcccaggttcatgccattctcctgcctcagcctcccgagtagctgggactacaggcgcccaccaccacgcctggctaattttttgtatttttagtagagacggggtttcactgcgttagccaggatggtctcaatctcctgacctcgtgatctgcccgcctcggcctcccaaagtgctgggattacaggcgtgagccaccatgcctggccctattgttactatttttacccctcacttctgtacagagcatttatggctcaagaaacatttgtcattttaattgtatgggagtcccacaacagcatagggagacatttctgatcattattcccattaggagggtggagaaactgaggctttgggaggtggtcctgacctagggaatcaatttgctgactcactaacccatgaagctctacagttaaaaaagactagattaaaaaatgagaactcagtaaaggggctgaggcaggaggatcgcctgagttcagaaatttgagatcagcctcggcaacatagtgagatcccctctctagaaaaattttttaaaaaattaggccgctcgaggcagagtgcagtggctcacgcctgtaatccaacacttcaggaggctgaagagggtggatcacctgaggtcaggagttccagaccagcctggccaacatggtgaaaccccgtctgtactaaaaatacaaaattagccggtgtggtggcacacgcctgtagtcccagctactcaataggctgagacaggagagtctcttgaacccggcaggcggaggttgcagtgagccgagatcgtgccactgcactccagcctgggcaagacagagcgagactccgtctcaaaaaatacaaacaaaacaaacaaacaaaaaattaggctgctagctcagtggctcatggctcacacctgaaatcctagcactttgggaggccaaggcaggaggatcgcttcagcccaggagttcgagaccaggctgggcaatacagggagacacagcgcccccactgcccctgtccgccccgacttgtctctctacaaaaaggcaaaagaaaaaaaaattagcctggcgtggtggtgtgcacctgtactcccagctactagagaggctggggccagaggaccgcttgagcccaggagttcgaggctgcagtgagctgtgatcgcaccactgcactccagcttgggtgaaagagtgagaccccatctccaaaacgaacaaacaaaaaatcccaaaaaacaaaagaactcagccaagtgtaaaagccctttctgatcccaggtcttagtgagccaccggcggggctgggattcgaacccagtggaatcagaaccgtgcaggtcccataacccacctagaccctagcaactccaggctagagggtcaccgcgtctatgcgaggccgggtgggcgggccgtcagctccgccctggggaggggtccgcgctgctgattggctgtggccggcaggtgaaccctcagccaatcagcggtacggggggcggtgcctccggggctcacctggctgcagccacgcaccccctctcagtggcgtcggaactgcaaagcacctgtgagcttgcggaagtcagttcagactccagcccgctccagcccggcccgacccgaccgcacccggcgcctgccctcgctcggcgtccccggccagccatgggcccttggagccgcagcctctcggcgctgctgctgctgctgcaggtaccccggatcccctgacttgcgagggacgcattcgggccgcaagctccgcgccccagccctgcgccccttcctctcccgtcgtcaccgcttcccttcttccaagaaagttcgggtcctgaggagcggagcggcctggaagcctcgcgcgctccggaccccccagtgatgggagtggggggtgggtggtgaggggcgagcgcggctttcctgccccctccagcgcagaccgaggcgggggcgtctggccgcggagtccgcggggtgggctcgcgcgggcggtgggggcgtgaagcggggtgtagggggtggggtgtggagaaggggtgccctggtgcaagtcgagggggagccaggagtcgtggggacgatcttcgagggaaggagaggggcatccgtagaaataaaggcacctgccatgccaagaaaggtcgtaaataggagtgagggtcccggggataagaaagtgaggtcggaggaggtgggagcgcccctcgctctgaggagtggtgcattcccggtctaaggaaagtggggtactggagaataaagacatctccaataaaatgagaaaggagactgaaagggaacggtgggctaggtcttgagggggtgactcggcggccccctcccgggagttcctgggggctcggcggccgtaggtttcggggtgggggagggtgacgtcgctgcccgcccgtcccggggctgcgggctggggtcctcccccaatcccgacgccgggagcgagggaggggcggcgctgttggtttcggtgagcaggagggaaccctccgagtcacccggttccatctacctttcccccaccccaggtctcctcttggctctgccaggagccggagccctgccaccctggctttgacgccgagagctacacgttcacggtgccccggcgccacctggagagaggccgcgtcctgggcagaggtgagggcgcgctgccggtgtccctgggcggagtagggaggggttggaaaggggccgagaaattgcactcccacacccctgggttgcaatgggcaagctccctccttggctcaaacgacaccccttggaatttacgcagatttggggatccaaacgtttacgactgaacactgtggtggagggggtaaccctgcctggttgttgactatgttataaagaagaggaggttgagggcacttactagaagccttcgtatttctcttattgccctcagcactgtagagacagtctctcatttcagactgcaaaaacctggtgggtgggaaggcctggcaggagtattcccgttttacagttgagcaaaccgaggctaagagagtgacgtccacttgctcagggtcagcagagcagatatctgaactgggatctgactcccaggccccattaagcaccatctctgggatgactgaagagcagccctctcttggttactgggctgtggcttttgtttacagatataaaagcttttttttttttttttttttttttttttaaagacagggtcttgctctgttgcccaagctggagtgcagtggcacaatcatagcttactgcagcctccatcctctgggctcaagtgatccttcccatctcagcctccctagtagctggttatcatgggcatgtgccaccacacctggataattttaacttttttttaggctgggcgcagtggctaacgcctgtaatcccagcactttgggaggccgaggtgggcggatcacaaggtcaggagttcgagaccagcctggccaacatggtgaaaccccatctctactaaataaaaatataaaaattagccgggcatggtggcgtgtgcctgtaatcctagctactcaggaggctgaggcaggagaattgcttaaacccaggaggcagaggttgcagtgagctgagatagtgccaccgcactccaacctgggtgacagagcaagactccgtctcaaaaaataaataaaaaataaatttttttttagagacaggagtctctccatgttgcccatgctggtgttgaactcttgggctcaaaggatccttctgtctcagcctctcaaagtgctgggattgcaggcctgagagactgtgcctggaccaaaacatcttgatacaggtactgtttcccccaaggaataatgatttttttttttttttttttttttgagatggagttttactcttgttgcccaggctggagtgtaatggcgtgatctcggctcactgccacctctggctcccaggttcaagtgattctcctgcctcagcctcctgagtagctgggattacaggtgccaccaccatgcccagctaattttttgtagttttagcagagaaggggtttcaccatgttggccaggctggtctggatctcctgacctcaggtgacccacctgcctcaatctcccaaagtgctgggattacaggcatgagccagcacgcctggccaggaataatgatctttttttaaaaaaagcatggtagttctgactcaggatgaaaatgcatacacccaatgtacttctaggccttatcgttgtgacaatctagagtttgctttgttccacttgactgttgtccagggagcaagggaaggggctagtttctcttctggtttcactgaatcccaagtgcttcctttatatcaaaccactttctcctctctcatgattttacttgattgggtatcacaataagaggcattttttttttaagagaaatcacccacaattcccctgagggaacacctccactgtgtcattcttccagtctttgaccacatgaatctttagcaatcacgctgttgtctttacattttttttttgaactttggaagtcattcgaagttttttacagagaaactacagctcgactgatgaagtatatttgctctgtgtgctctagagctttctattggatcagaagttatctctaactcctgggctcaagtgattcacccgccttggcctcccagagtgctggggattggatattttgatgtcagtgggcattgaggagtggcttctcggggaaggcaaacttgatccagtcttggagagcaaggcaggggctagaaacaagcttgtatctgagcatgcgtctggggtgtcccagtgctaaggctggtgactttgttttcctgcaccaagatatttggtagcaccaagggtgggttggtctggtttttatttctcccttctaagctcctgtgtttgaccaataatattattacatattaacactaatatgttaataattaatagtgacacgtattcacttttgcctcagactctggggcaagtgcttcacatattttacctcatttagtcttcactagaacgttaggagggtgggcactgttattcttcctactttgcaagtgaggaaactgaggcataaagcaattctgtaatctgaagcatccgcagttggtcttttctcttcctttttctccttgtttttcacctcaataacctgaaaaaacaaaaacaaagaaaaaaggtgtttggggaattagtgtccaatgtgaagtaagctgagaatggaggtgttgacagggtgggacctccgagagggggtggtgatgatggagatgggtcagacccgggggaggtggcgggggaccctgggactggtgatttagtgggaagaggcagccttcacacagaatccgcaggcctctggtgtggttggtttcagttccctttatgttcacagacccccacccccacacaacagatttcctgacatttaatatttgttttggcttttttggactgtggggtctccttgtatcagtccaatgtggagtcgccccaggatggaagtgcccttctggtaaaatcacacgttcaatctgaggaactggcttgtgattttaaaaggccgctaggacttgggatgtggcctgactctctttggacagtgcacggaagtgaagggatggatgtaacattggcaccaggtttagacattggcttcatggagaatttactccatgggaattttgaaacttgaaacctgtcactttttgtgcacaggcagctgtagggtcttaactcaggggactttggagtgtttgctagggtcattcctctgccccatgctgtggctgaccccatgatctcaaccttgtatttattccattggtttatctccagcttctagaatgaagacctttacaaaaaaaaaaaaaaccaaactcaactgtaataaaccagtttttgttttgagacggagttttgctcttgccgcccagcctggagtgcagaggtgcgatctcggctcactgcaacctctgcttcctcagttcaagcaattctcctgtctcagcctcctgagcagctgggattgcaggcacatgccaccatgcctttgtatttttagtagagacaggatttcatcatattggtcaggctggtctcaaactcctgacctcaggtgatccgcctgccttggcctcccaaagtgttgggattacatgtgtgagtcaccatgcctggctaataacccagtcctttagagttgctgcttattttccttcttcatagcacacaccggtctgagaaacccaggctattagacagtttgggatctctgaagtattagcctagtaaccacagctgtaagttgactcaggcgcggaaaaaagaaaagctggcaggctttcccagtgattgttttcttcctttgcttgctctgcaatctggccttggaaacacagggcctatatttcagtgttgaggtttggctgcttgaggggttgacctagttcacaggcacccaaactttgtggattaaatacacccatttcccctccttttttttttttgagacggagtctcgctctgttgcccagactggagtgcagtgacgtgatctcggctcactgcaacctctgcctcccaggttccagtgattctcctgcctcagcctccctagtagctgggactacaggtgtgtgcctccatgcctggctaatttttgtatttttagtagagacagggtttcgactacggccataccaccctgaacgcgcccgatctcgtctgatctcggaagctaagcagggtcgggcctggttagtactagtacttggatgggagacagggtttcaccatgttggttaggctggtctacaatctggagttttgctcttgttgcccaggctgggcaaactcctggcctcaggtgatccgcccaccttggcctcccaaagtgctgggattacaggcgtgagccactgtgcccggccatttcccctcctttctgaaggatgtgctgaacgtttcagaaaacagtatgcagcctccctaatacaattagacttttaaaaagcaaacccagaaaccagctttgggatcaccttacatcatcagatccccaccccctacccctcaaactcataaaagtcacttccccaattactcatgtctgtgacaaaggttgatctgagcttactgggaaagaagaccagtgggccgccctcctggccttgcctttgtgtctctggaggtgcggaggtggaaagtcttgggcccggcaaggccatgtaaagaaggcaggctgctgcttcctcccagtggggccctgcctgcccctctctgccaggtggttatggaaatccctgtttgctctccagggctttttattgggtgaggcttttcttccaaaatgctcaccttgtgtctgttacacattcccttccaaggtagccccagatacgccagaggctgaagctctcgtatctcccagaagctgcccaaaccctaaaatccccgagaggcacctgtcccaatccaatccttgctgggtctctttctttctttctttctttctttctttctttctttctttctttctttctttctttctttctttctttctttctttctttcttttcttttctttcttttgagacggagtgtcactctgtcgctcaggctggagtgtagagaggtaggatctcagctcactgcaacccccgcctgccatgttcaagtgattctccagcctcagcctcctgagtagctgggattataggcacgcagaagcatgcccagctaatttttgtatttttagtagattcggggtttcaccatgatgtcaggctggtcttgaactcctgagctcaaagtggtctacctgcctcagcctccctaagtgctgggattacaggcgtgagccaccgagccgggccccttcctgggtttctatcctgcctcagctctatctcctttgagggcacaaggctttcaaaaaggagaatgaaatcattcagcagtggctgtttaggatccttcagcgaggaagtacaggaaactaggtttgaattttagccactagctatttgactttgaataagtcactttacttctatgagtctcagtttccccacctgtaaaatggggcggtaatacttattgatctattatgagaattaagtatgtacattcatttagttcacaaaagtgagtgcctgttgtgtgttagcaccaggctagaccctgaggttacggcagattggacggaacatacatgccaatgggcaggaatgtaaagagagaaagtagagagaatattttcaacagtagttgatatttcttagggacacagtaaactctcaatgttattttgagcaaatgaatgaacacatgaataaatcgctatcttggccaatatttttccctctcaaactctatggacttggtccagcccttaaggttgattgtaaatgggcggggaagaatttggtgggttagaaccttccattatgctctgtgtgtgctggggatactgtgttcatagcttccctctgaacagctgtgcagggcaggcagggagatctcaaacctgagtctggaaatgggagggcatatagccatttttaagtgttttccacctttggtcaaataaaaagaaatctgtggtgcatgctcactctttctctctctatccccatctctagccatctccctttctttctctcttcctctttgttaatgtaagtttccctaggccagggatctcagtgtcccagcttgttcttgttactcttgggggactggggtttaggcctcctccctttctgcacttttcatcttcctccttccttcctcttacctgcctccaatcctccacttctgcccaagatttgggtggcatcttccccaaattcagaaggttcttgaatcagactgcctagatttcaatccagacaatgtcacttcccagcctagggatgtcagccaaggacttagtttccctctctgtaaaatgagcataatagcatggagacatcataggatggtatgtcaagcgttcagtgaatatgaaatattagagccccaggaggacttggtgctgtctgtttgaaagtctcccatgttttacgtttggttcaaaagatcccctgcgctccctctcacccagcaaaccagccaaaccagtttcttcaccctgcctgcttctgtgttaagcaaacagtgcactgcaaacagtgactaagcctagtgccttgttaggaagaaactggcgtttttttgcttgccactgtgcagggtgctcagggtggaccggaacgggtttgttgtggcttaggaaaggggacctgctcgtggaggttgtgtagaactggagtgggaggagtggggcaaggcgcagctagggccgggggagtcgggatgatcttgaacttgtcagcttctgcttggcttttaaaagttatccaggccagatagatgctgtggctcacacctgtaatcccagtgctttgggaggccaaggccgcaggattacttgagcccaggagtttgagaccagcctgggcaacgtggcgagacccccatctctacaaagattaaaaaaaaaatttagccaggtatggtggcgtgcacctgtggtactagcatcaaaaaaatgcaaaaatttgctgggcgtggtggcatgtgcatgtagtcccaactactcaggaggctgaggtggggggattgcgtgaagcccgggaggtcgaggctgcagtaagccatgattgcaccacggcactccagctgatagagatcctgtctcaaaaaaaaaaaaaaaaatatatatatatatgtatatatatatgtatgtgtaatatatgtgtatatatatgtatgtgtatatatatatatatatgtatatatatttcatgatgcacatgcctaagaatacctgtctgttctcctgctgccaaaaacgctctgtcccagcccctgagatccttgtggctaaaaatcaaatcacctagggcacttcatgcagacttgccctcttgcagattcactgagagccaatctccaagggtggagatctgaacttgacatttacttacttatttattttttgggatgaagtcttgctctgtcacccaggctggagtgcaatgacacgatctcagttcactgcaacctccgcctcctggcttcaagcaattctcatgcctcagcctcccaagtagctgggattacaggcatgcaccactacgcctggcaattttttttgtatttttgtagagacggtttcaccatgttggccagtctggtctcaagctcctgacctcaggtgatctgcctgcctcaacctcccaaagtgctgggatcgcacgcgtgagccaccacacccagccttgaatttgatgtttttaaaagctcctcaggccaggtgcggtggcttacgcctgtaatctgcactttgggaggccaaggcgggcagatcatgaggtcaggagtttgagactagcttgaccaacgtggtgaaaccccatctctactaaaaattcaaaaattcagctgggcgtggtggcatgctcctgtaatccctgctacttgggaggctgaggcagaagaactgcttgaacacgggaggtggaggatgcagtgagccgagattgtgccactgcaccctagcctgggcaacagagcgagactccatctctaaataaataaaataaataagcaagctcctcagatatctgctgccactcaatgcatttccctggacaatcccaggggctagatgtttgatgagtaaataccccagccaggatgtgggcacctggttgtccagcccaaggccagggatcccaggtcacacccttgatcagggagggataggctggtgcttctgccatgcccaggattgagaactctatggatgcaaggaggggtggatgggaggctgggtgcagtggctcatgcctgtaatcccagcactttgggaggccaaggtgggaggatcacttgaggtcaggagtttaaaaccatcctggccaatatggtgaaaccccgtttctgctaaatataaaaaaagctagccgggcgtggtggtgcatgcctgtaatcccagctacttgggaggccgaggcaggagaatcacttgaatctgggtggcggaggttgcaatgagcggagattgtgccattgcactctagcctgggcaacagagcgatactccatctcaacaaacaaacaaacaaacacaccaaagtggggtggatgggtgtgggagtgggggacccagagaagtatccagtgcacccaggcctaagactcaccccctacactcagggagattccagaaaatctccaagagagacctctcagcaggtaattccagtaggctccaagaatgccactggaatgagaatgtgttcaggggatgccaggagtggtcagcttcacctgctgggccttgatgagtaagagggtgtcttccatgcaaggaaagggaaagggcactccaggaggaggaagtggggtacccaaaggtgtggcagggtcatggaggcagaaggctggagctgtgccttcctgggcacagaaagaggagggaggagagggtcccaggatgaggctgcagaggcagctgggccagggtacctctgggccttgggccgtgggtcatggagggttttctctttctgggcttttcataggcaaattattcacccggttaaaaaataagtttaaatatacatcttcatatatatatgaaaaagcttgtatatatgtctgtatggcagacagtgaagtctccttcccaccccaaaccacgcttcacccagttcttccctggggcacagggaacagatttcattagtctcttgtgtatccttttcagtgtttccttatggaaatacaagcatagtcttctttctttatgccagcgtaaattcctaacatatgatccttttacacaaagcatagcatatgatagcactgctctgtaccttgtttttctcccagcaacgtatctgtatgttctctctctctctctccacacatatcttccttagaccgaatcttgctctattgtccaggctggagtgcagaggcgcaatctcagcttgctgcagtctccgcctccctggttcaagtgattctcatacctcagtctcccgagtagctgagactacagacacatgccaacacacccggctaatttttgtatttttagtagagacagggtttcaccatgttggccaggctggtctcaaactcctgggctcaagcaatccacctgcctcggcttcccaaagtgctgggattacaggcgtgagccaccgtgcctggcccatttttattttttttaatttttaaaaaaatttttaaaaattatttacttttttttttttttttttgagacagagtttcgctctcattgcccaggctggagtgcaatggcatgatctcggctcaccgcaacctccgcctcccgggttcaagtgattatcctgcttcagcctccagagtagctaggattacaggcatgctacaccacacctggctaactttgtttctttggtagagacagggtttctccatgttcatcaggttgatctcccaacctcaggtgatctgcccgccttgacctcccaaagtgctgggattagaggcgtgagccaccatgtccggccattttaaaaatgtttaattttaatttctgtgggtacaaagttggtgtgtatatttatggggtacgttcttttattttctttttatagctatgcggtatggatgcaccataggttatttagccagtccctgatagatagacactgggtagtgtcctatcttttaggagacagtatttcagacagtaacctgggatatacattttttttctacacattctggtgtatctggaagatgaatttccataggtgagcctgctgggtccaggtatgtgcatttgtaattttggcagatattgccttccacaaagactgtgatccatttgcacatcagcgtttagagacagtcggttcccactgtcccagtggaggttttgagaaagaggttgggagaggtgttatgtgcctgcctgtctgaagataaaacagttttttttgtttttgtttttgttttgagacggagtctcgctcttgtcgcccaggctggagtgcaatggtgcaattttggctcactgcaacctctgcctcctgggttcaagcgattctcctgcctcaccctcctgagtagctgagtacaggtgcctgcaaccatgactggctaatttttgtgcttttaatagagacgggatttcatcagttggccaggctggtcttgaactcctgacctcaggtgatccacctgccttggcctcccaaagtgctgggattacaggcatgagccaccgtgccctaccaatagacagttttgatttgggggaaggtttccagcaactaagtggttctaaacaagaagtaatgccagcagcttccagaatgttcctttggaccaacactggaaacagaggagaaagaggaacaattcaggggaggaaaattagtttttggtgaggaatatgttgagtttgagtgtctgaaggacacagaggtggagttttcaaaggggtatttgggaatgtcagctctgtgcttggaataatgtgaagtaccagtttaaagaaggatttgtataggatagtgatcttttttccttaatcttgtgtcaatagatacagagagttttcagagacctcacacgctggaggattaaatcatagaaggtgtttgtttggagagtgtttacttgaaggtggccagcagatgaaagacaactatttgtgtccatttgcacagggttagagagtgggtcctgccagtgaccttgcacgcttgacagttaatcctccctgtagtccaaggtgggaattttcatcatcccctactgtggaagaggaatcaggctcagaggttgcactgcttgccaccaagtcaccccgccaggtgatggcagtgctggggctgcaggccaggcctttctccttccaaaaccaggtctctcatcctgttccctctactacactgttgccaaactcagcatctccagtgggacctgattcacctttctaaaggaaacgccaaactcagcatctccagtgggacttgattcatctttctaaaggaaacgaattcccttcttcccttcggagaagctgtcattgtacctttttcatctcacttattttatttattttatgattttttttttaagaaacagagtcttgctctgctgcccaggctggagtgcagtggtttgaactcctgggctcaagcaatcctcccatcttggcctctcgaagtgctgggattacaggtgtgagccaccaggcctggcctgcctctcactaattttgattgtgatgctagaattcagcttttttttttgcctttggaaggcctcttttgtcttttgcttatgggcagtttcagccggtttccctcttgaccttcacttccaaataaatgctagctgaacagcgcttctcttcctttcggtctctttcaactctctgggtcccagaaaatccacttatattggccttcaagacttgggagtgtagggacagggaaaccgccttaaagaaactcttgttccaaatgagacctactcaagccgcttggccaggcaggcatctggggcatggctcttgctgctgaaagagggaaagttactactgggacctaatggggcctgcctagaagggttgaacctgttccacatgagcaagatcataaacggtggccagctcaggaccccgtgggataattggccaagttctagataataattagctggctttgtaattaggagagcttgtaacaagccaaaagcctttcaaatttatttgacctgggcaagttcaagaagaagaagagcacctgattctgtggtttggcattcaggtacgcctgtacaccttctttctccttggttttttttttttttttttaagacagggtctctgtcgctcaggctggagtacagtgaagccatcttggctcacttcagcctcgacctcccgggctcaagcaatcctcccacctcagcctcccaagtagctgggatacagacacacatcaccatgcccggctaatttttaaaattttctttggaaaagggatctcgctatattgcccagactggtctggaactcctgggctcaagggatcttcccaccttggcctcccaaagtgctggatttacaggcatgacgcccagctgtttctctattcccaaaagagaagtttcagcatgtcttcaccttcattgtcgcagcagcttccttcctggtctccccacttattccttccccttcctccaagccagtcttttctccatccatcagtcagagttgatggtttttaaaattaagttagaaaatatcacgcctgctccaaattacccatggttccccatttcaaacaaaataagcgcctaagtcctttctatgacttctgaggcttcactgatctgtcctttgactcatgtacctggggtcctcatctcttcccactcttctgcatgctcactttgcccaacaactttgtttcctggttatacttagaacacactacacactcttctacctcagggcctttgcactggctgtgaccattcccataatatctgcacagctcactcttttctgtcctgaaaagactgcaagcctttgcttaaatgtcactcccgccctcagggaggactttcttgaaccccttatttatttatttatttatttatttagagacggagtctcactctgtcatccagtctgcagtgcagtggcgcaatctcggctcactgcaacctctgcctcctgggttcaagcagttctcctgcctcagcctcctgagtagctggggttagaggcatgggccaccacgcctggctaatttttgtatttttagtagagacagggttttaccatgttggccagactggtctcaaactcctaacctcaggtgatccacctgcctcggcctcccaaagtgctgggattatagggatgagccaccgtgcctggcccaatttatttattttttgagacagagtcttgctctgtcacccaggctggagtgcagtggtttgacctctgctcactgcaacctcagactccagagtagctgggattataggtgcctgccctcacacctggctaatttttgtatttttgtattttttttttttttttgagatggagtctcaactctgtcacccaggctggagtgcagtggcttgatctcggctcactgcaacctccgcctcccgggttcaagcaattctcctgtctcagcctcccaagtagctgggattacaggcatgtgccaccacgcctggctaatttttgtatctttagtagagactgggtttcaccatgttggccaggttggtcttgaactcctgacctcaggtgatccacccgccttggcctcccaaagtgctgcgattacaggcgtgagccaccacacccaatctggaccccctatttatgatagtaaaccctgccctcagccctccccacctcttttacttaattttcttctagtacttttcactgtctaacatgctatgtatttcacttatttctcctgttcactgcgggtctcctcccactagaacagaagcctcaggaggccagggatttttaatgtcttttgttttgtacttgggctgaattgcagttagaatagtgcttggtacataataagggctcagtaagtatccgaaggaatgaatgaatgagaggtttcagagtgtatttaatacagacaggactaaacagatctctctagaggatatttcactgtagttgtttttttctttttttaaagacagggctttatgtattagccacagagaagggaggaggggtgttctcagggcgtgtgcctctggttggcactccccagtttctctgagctctgcacacccctgatgtaaccttacctaattgtcttgtcacaaaacagcttgcagtctggagtctaaaggtcagatgagccatttctaccccacacttctgagtgtaaggaagcaccagatcaaaatctaggcagatatctgagcccgccagagccatctgtttggtttcctattgtgtgggtaacaccttccttgagcaaggctctcagatacacccaacacctgccccctgggtatctcagcatccttcagacccatgaattgttcaagaaccgatgtctgttcttccagtttttggcagtgcagaggagcctggaaagagcttgatgagagacgcaaaaagctcaaagacaaaaatgcaaggccggccaggcgtggtggctcacgcctgtaatcccagcacttcgggaggccgaggcacaaaaatctcttgaacctgggaggtggaggttgcagtaagctgagatcgcgccactgcactccagcctgggcgacaaagcgagactcagtctcaaaaaaaaaaaaaaaaaaaagcaaggcctgcttaatcagatctcggccaagataaaaatctcatggcttcaaaatccatctgatcaataaatattcatgagagagtactgtagggcaacatcttgtaaatcttttttttttcttattttcttgagagggagtctccctctgtcacccaggctggagggcagtggtgcaatcttggctcactgcaacctctgcctcccaggttcaagcgattctcctgcctcagcctcctgagtagctaatttttagccaccatgcccggctaatttttgtatttttaatagacacggggtttcaccgtgttacccaggatggtctcaatatcctgacctcgtgatctgccctcctcggcctcccaaagtgctgggattacaggcgtgagccaccgcgcccggcacatcttacaaatctttatgtaacctagactgtcctgccttcagcagggtaatggcttaatgggtagtgtggctagatttagcaaataacaatacaggactatcagttacatttgactttcagataaacgatggctaatatttagcataagtatgtcccatgcaatatttgagacatacttaaaaaaaaattatttggcaggggcagggcacggtggccgactgtaatcccagtactttgggaggctgaggcaggcggatcatgaggtcagcagatcgagaccatcctggctaacatggtgaaaccccatctctactaaaaatacaaaaaaaaattggccaggcgtagtggcaggcgcctatagtcccagctacttgggaggctgaggcaggagaatggcttgaacctgggaggtggagcttgcagtgagccaagtgagccattgtactccagcctgggtgacagagcgagattctgtctcaaaaaaaaaaaaaaaaaattattcggcagggcacagtggctcatgcctgtaatcccagcactttggaatgttgaggtgggaggatcccttgagaccagcctgggcaacatagggagaccctgtctctacaaaagatttttaaaaattagccaggcctggtggcatgagctggcagacccagctacctgggaggctaaggtgggaggatcacctgagaccacagaggtcaaggctgcagtgagctgtgactgcctccctgcactccagcctgggcgacagagtgagacactgtctcaagaaaaaagaaaagtatttgttgttgtactctgtattgtgatcataagcaacagtgtattgagcggtgctttctgtatgttgaactcttcccgtatgccatctcctgtaaccctcatgcacacaggtgtgtcatgcacacaggaagtgggagagcctggccgtatgtctggtggctgttggactccaaagtctgtgctctttatagcaggaaaaggcaactcacagaacagtctgtgagcagccaggtgaaagggatggatcattccttctctgaaggtctcaggtgacagaggtatttgtctgtccattcacttaatgaatttgtgctgagcacctgccaagccctctgctaggcattggggatgcagcggggcccaaacagagaaaaagccctgtcctcatggaatttctcttctaattggaggggacaggtagatggtgatgtatggaagaaagaataaaactcagcaggaagggtgataaaaactatgcattggggtggagaaatttaggggcagtcatcactaagaaggatggcatttgtgtaaagaagaagaagtgaggtgctcaatagatgttagaactggactgtgtcagctgggtgtggtggtttatgactgtaatcccaagccaaggcaggtagatctcttgagcccaggagttcaagaccagcctgggcatgatagaaccccgcctctacaaaaaatccaaaaattagccaggtgtagtggcatatgcttgtagtcccagctacttgggagctggggtgagaggatcacttgagcctgggaggttgaagctgcctgggaggtttagccatgatcgtaccactgcattccagcctgggtgacagggcaagactctgtctcaaaaaaaaaaaaaaaaaaaaaatagaattggactgtatcttgaggggactggacttctacattcaagtctatattcatgtcattgaaaaagactgttctctagtcaggcatttttcttttaatttttaaattttttgttaaaataaatagagagggtcttgttacgttgcccaggctagtctcgaactcctgagcttaagcaatacccccgccttggcctcccaaagtgctaggattacaggtctgagccaccatgcccggccaggccaggcattttctagagaaggaatcctgagggctcattttcacatctccttcattttttatttatttatctttctcttttgacctgccactttaggaacatctcctttaaagggtatcagattcaaaccaggaaataatgctcattccaagccactccccacccctcagcatgttgcccaagaggaatattgctccagcagagttttctaaattttttttttttttttttttgagacagagtcttgctcttgttgcccaggctagagtgcagtggcctgatctcggctcattgcaacctctgcctcccgggttcaagcgattctcccacctcagcctccggtgtagctgggattacaggcatgtgccaccacacctggctactttttgtatttttcgtagagacggggtttcaccatgttggccaggctggtctccaactcctgaccttaggtgataagccctcctcggcctcccaaagtgctgggattacaggcatgaatgagccactgtgcctagccgagttttctaaagattcttcctgcagagggatgatattttctaaacaggcatcatttagggcatattttttttttttttttgtgcatgtatacgagtgttcctaggacctggtacttactttggaatctcaccttcagtacgaggcttcctccccaacaaattcttcaccacaactatgtgggagtgtttgaaaaagggaacaagatgaccaacttgttggtggggagagttgtggctttcctattggaaaacatcatcccttgaataagcagtgaggcaaacacctgggcacttactttatgaacaggtggggtggggccctgagtcaccgacattgagaggcctctcctggtaaggtttttcaatatcaggttgaatcagcggtgacatcaccctctatagtgacaggtactctaggtgccggctcttactcataagtcccaggagatactagccctagatctcgtctctgttagcttcgtgctaaaaggttttggagaaataacagctgcttggtgacgttcatgtggctggtttcattaccacctaactcccaggcttgtaatcatgactaaattttctggagaaaatagaatttgtggttgtatttcttgtaacttttgccttcttgtctcaagtctgcatttaaaaagaggccgggtgcggtagctcatgcctgtaatccagcacttcgggaggccaaagtgggaggattgcttgagcccagaagttggagaccagattgggcaacaaagggaaaccctgtctctacatacaaaaacaattacccaggcatggtggcgtgtgcctgtgatcccagcttcatgggaggctgaggcaggtagatcccttgagtccaggaggttaaggctgcagtgagctgcgttttgcaccactgcactccagcttgggtgacagagcgagacgctctctcaaaaacaaaaaacaaaacaaaacaaagccctcttctactccttgaggtttttggatgtttcagagctgtattttgagtctctgatttttgttttgttttgttttgagacagagtcttgctctgtcacccaggctggagcgcagtgttggagtctcagctcactgcaacctccacctcccaggttcaagctattctccttcctcagcctcccgagtagctgggattataggccagcgccaccatgcccggctaatttttgtatttttagtagagacagggtttcaccatgttggccaggctggtcctgacctcaagtgatccgcccaccttggcctcccaaagtgctgggattacaggtgtgagccatggcaaccagctgagtttttgattttgaaacttcctgtaagttgtacttatttttctttgggctttgtaatttggttatgatttttcattcttctttctgctaatcctctcacttccaccatgggagtgtttaaatacctgggaagctgttgaacctaggaaaccacattttacttgccagatgtgaggtttcatttctggttttgacagagatttgactcttcagcatttatttctcttttagcctatgagcttctcttagagaagatgaactgggagggtggaatgcagcaggattgcctggattccaatcccaactggacccttacttttcctgtgattttgggcaagtttctttctctttctttctttctctctctctttttctttctctctctctccttccttccttccttccttcctttctttctttcttttttttgagacagggcctttttctgtcacccaggctggagtggagtggtacaattttggctcactgcaacctctgcctcctgggctcaagtcatccccatcctcccacctcagcctcccaagtagctgggactacaggtgcatgccaccactccaggctaatcttttttttttttttttttgtattttttgtagagacgaggttttgccatgttgcccaggctggttttgaactcctgagctcaagccatctgcccgcctcagcctcccaaagtgctgggattacggatgtgagttgctgcactggcctgcaagtttctttcttttttttcaaatttttttgtgtccctcccctctatcccaaccccaccccattttgcctagggtaggcttctttttatttctttttttttttttttttttttttttttgagagagagagagagagagagacccaaatgggaattccctagggccagtttcttaatctttctgtgcctcagtcccctcacctgtacaaaggggataaacatagcccctaccacaaaggattgcaatgaggattcaatgagttagcatgtgcgaagtgcttccagtgcctggtacgtagcaaccactcttcatttagtttttattggctgggctccgtggtacacatctgtagtcctagctacttgggaggttgaggcaggaggatcacttgagcctgggagtttcgaggctgcagtgcatgctgattgtgcccgtgaatagttactgctctccaacctggtcaatgtctcaagaatcgatctctaaaaaaacaaattagtttttctcattagatgtttctgctttagacttgtgtcaagggagtgaaaaagcatggggcggggggcgggtagtgtaagtgtcaaaggagccacagaggattgagtatgaggaagagtgatacccccttatcactttgctcttgacctcctaaagaataagacgctcctttgacccaacatccatttgagtgcaattttttttttttttgagatggagtcttgctctgttgcccagactggtgccatctcggctcactgcaacttccgcctcccgggttcaagcaattctcctgcctcagccttctgagtagctgggattataggcgcctgccaccatgcctggctaattttttctatttttagagagatggggtttcaccatgttggtcaggctggtctcaaactcctgacctcagatgatctgcccctctagccctctcaaagtgttgggattacaggtgtgagccaccgtgcccagctaattacatttaattaatttattttgaaaaatacaaggtctcactgtgttgcccaggttggtctcaaactcctcggctcgggcaatcctcctgcctcagcctccgacaagtggtgggattacagggggcacagtggctcatgcctgttatcccaacactttgggaggccaaggcaggagaatcgcttgagcccaagagttcaagaccagcctgggcaacatagcaagacccccatctctaccaataataatagtattgttatacaatgaccacaatagtcgttgcattcatttattgattgagtactcaactgttcatgtatgatcttgtttttttaatccttgcatcaactttagagttaggtactatggcaattccattttcttttctttcttttttttttttttttggttgagatggaattttgctctgttgcctgggctggagtgcaatggtgcgatcttggctcactgcaacctccgcctcccgagttcaagcgattctcctgcctcagcctcccaagtagctgggattacaggcgcgtaccaccatgcccagataatttttgtattttttaatggagacaaggtttcaccattttggccaggctggtgtcaaactcctcacctcaggtgatctgccttggcctcccaaagtgctaggattatagattataggcgtgagccaccacgccgggcctgacaattccatttccaaatcataaacagaagcttctacagctaggggagctgggaaggaaaagtgtgtaccgccctggctggcttttatccttcctgtgctcagcggctctatttctaagaatgtttccattctagatccatcactttggcctagaaaggagcctcatgccaaggtccacccatgcagcccctaaaatccccttttccaccgtgcccggctgagtttttaaaattctagttttccacagatggaaatgtgaactgtcttgtaaagtattccatatatatatattttttttttttttttaattttttttttttgagatgaaatcttgctcttgtcccccaggctagagtgcaatggtgcgctctcagctcactgcaagctctgcctcccgggttcatgccattctcctgcctcagcctcctgagtagctgggactataggtgcccaacaccacgcccagctaattttttttttttttttttttgcatttttagtagagacggggtttcaccgtgttagccaggatggtctcaatctcctgaccccatgatcctcccccactcagcctcccaaagcactgggattacaggcatgagccaccacgcccagcccttctaaagtattttaaattctagttttccaaagatgggaatgtgaattgtcttgtaaagtataaccgtctcctgcccctcctttataacaggccttggagaattttgcccctcctttataacaggccttggagaatgtttctcccccattctttctctttaatctgggcaaggtgtctttattaataatatcacagaccaccacacacaccttgaggtttagttctcttccgcacagtgtgtgagtgccttctgtgtgctctgtgtcagttaccagccttgtttccaggagtttggagctgacccaggggtgatagaaaacactgggatgccaagtcgtcagacaatgggctcatttagaattcaggtggggtgggactgtgtgggctgggtcagctggtggagcttccccagagtggggaggccagggggagtctgggatgtggggtggtatgtgaacaggaatacggggagactctcagcctctgttgttggctgagagggggatgccccaagcctagagaggtgggggcgggacctcctgtgcagagactgggagacaggaatatgacagatggtatatttggatggtgactcagataggtcaagtgaaactgaacttccggtcctcgagtcacacaggagggtaggggctgtgagaaaactccctcgttggttcttcctacagggcctttgaggcagacagggctcaacagagcctggcaggactgcagaaggacaatagtgtggctggttgggtgaggcccttttggcctgaaggctagcaagctgggagaacttggagaacccggacagcaggtcctctgccctcccgctgcctggggcagcccttggagaggcctgagtggtctaggctgatacatcaggcttggggcagccccgctgggctatcccataccctctcccctgcccccacatgtttatcccaaatccccttctcctcaagcttgcttctaggtgcccatctcacccatcctacccatccatgtgtctatcctccattcgtttgttcagtaatgatggaggggctgttatgcgccaagcactgttgtgaatggcggacacagagacccagacacatatgaatgtcccccatcatggaatttgtattctcaggtattgcagggagcaggcaataaacataatcaatgtgcaaaatatttagagcactgagtggagacaggtgtgtaggaaagatgaatcggaatggagcattgctgggaagtactagggtgatctgagaaggcctcactgaagggggacatttgagcaaagacccaagagaggtgaaggatcaggccatgtgactaggtagggaagggtgttctagacggaggggagggcgttctagatggagggaacagcaaagacacacccctgacactgagcagaagggcaaggtcagtgatcaaggggcaggggctggcagaagggcagagggggtggcagcatgtggagggccttgtacccatcaccaggactttgtctttcacttgggactcctctggtcctttagcccagatccaccggctgcctcctcctgccagttctgcctcccctctccattctgggcagtggagcctgatggttagtagcatgggcactggcctgcctgctcaggttctgagctgagcacagaggtctgggcctcccctgggcttctgctccatttggcccagggtggggccatggactcccatttccaatggcgctgctggctctggcatattctgacccctccactggggacacctcccagtgttccttgcctggctcatttctctctcagggccatcttcgttgttgctacctctaggaagccttctctgatcctcatccccaaggcctgtgtcgggatacgtcctactccttccctttgccagttgggatcccctgggttcctttatgctcccccaccaggctgggtacttgggaagtattcgcagcccccagcattaagcctggcatgtagttgccactcagtgagtagtttgatgaggggctctttgctgtgggaggattaggctgcagggttaccccataacccccagtggaggtgacttatgtccatcttttggggacttttgcagtgagggagtgcattataatggagaggaggaagccagattcctaaaactttcaatcacattttgctcctctcagaaacaaaaacaaaacaaaacaaaaacacaggccgggcatggtggatcacgcctgtattctcagcactttgggaggccaaggccagaggatcacctgaagtcaggagtttgagaccagcctggccgacatggcgaaacccagtctgtactaaaaacataaaaattatccgggcgtgttggtgggcgcctataatcccagctacttgggaggctgaggcaggagaatcgcttgaacccctgggaggcagaggttggagtgagccaagagtgagcaccactgcactccagcctcggcaacagagcaagattccgtctcaaaaaaaaaaaaaaaaaaaaaaaaaaaaaaagccccaaaccagctgagcttagatggatctctctggccatctttttaaacagtaagggacctttaaaaagtttgattcctctcttccccacagcaaggctatttgcttcctgaagataaatcaattgtaaaaagtagcttaatttaaagcgttcaattcccctgctttttacattgaggagaaattatggtgacagctattcctgttttgcgtgcttagtaccagccaggcactgagcccaaaactccaactcactcttggctgttgagccaaccctgtgccagaagaaaatccccactccctacaatgtgtggaattcacattatagttggagacagaaggggagaaacaaacacagcctgccaatcctggagaatgcctggtgggggtgctgggggaagaagtccaatttcagctgggaaaatgggacaggagccttgggagtgggtttacacctcaaattcccttatggccacagtccattggcccctagcctcctccccactttacagatgaagagactgaggtttagagagaggaacagccggcttggcagaggcaactgctgaggcagttgaggaaaggtgaggacctcccagagtgagaggggcaagggaactggaagtcaactgtgggacctggaagtaggggagggaagaataaatctgcggaggggtctccttccctcggccctcctcccccacttctgggaaagtggttaccgttgtcagctccaggatttgaaatgctgattagttcattagcagttgtttataggcctttgcctgtctgacattttaaccctgtgaagtccaaggaaacagttctctgtctttaatgtgcttcaaaacctcctgcaaaactaactacaagtgcagactgcacccctagagattctgatgtttaagtctggggtgagtccaggaatctgcattttaaaataagcccatcctgtgctggaactggtggtccctggatcccactgcaaggacaacctgggcgagagcaggtttccaaacctgggccagagctggttggggggatggcggacacatggagagcttaaaagtggagactttgaggggctttccctcccagaggttttgagtcaagagatttgagatttgatgggtttttttgtttgtttacttgttaaaaaagatgattattggttgggtttggtgggggatgggctatgaagctacccgaagttgtagacaaaggggtgtgtgtgtgatcagttcacagatgtggatcatgtctacatctttcatcagatttctctgaggagtcatcccagatgacatttagggctaactctgagtggaattaccagtctaaaatgggagctggccaggcatggtggctcacgcctgtaatcccagcactttgggaggccaaggcgggtggatcacctgcggtcaggagtttgagaccagcctggccaacatggcgaatccccatctctactaaaaatacaaaaattagccaggtatggtgctgtgcacctgtagtccaagctacttgggaggctgagacaggagaatcgcttgaactgggaggcagaggctgcagcgaactgagatcacgccactgcactccagcctgggcgatagagtgagactccatctcaaaataaaataaaataacatagagccaatctcagggtctatcaagacaggtgaagggaaatgaagttaaggcctgcaaactccctgtgtgttcttggagaaggaaagcaagcaaaatatgcaaggtgtgtaacaagcaccagcaactcagtggtggaggagggattccagtgtatttggagaggagaccttaggtggccagggagccccttccttctgtctgtctgttcatctgttcacccatcattcactcttccattcaggtagtccttggccacctgctgtatccaagatctctggctcctagtgcggtgacggtagactggataatgcagactagtggatgatttgacaagttaacttacatggttttggaaagaggcatcacttttatgactctgcaaacccaactcccttatttctaacttgcccagcccaatattaaaatgcatcaccaaaccctcctgctgtctgcggagaagccagcatgaaactcaagctgagcagaaaacagatccagcatggagataaggcagctgcagtttcacttttaggttgggccaactgagaattttggggactttccttgctgtgaatgtggaattaaattgcttttttatttttattttttatttttcgagatggagtctcgctctgtcgccaggtacagtggcgtgatctcggctcactgcaacctctgcctcctgggttcaagcgatttgcctgcctcagcctcctgagtagctgggactacaggcaactgccaccacacctggctaatttttgtatttttggtagagacagggtttctccatgttggccaggatggtctcgatctcctgacctcatgatccgtccgcctcggcctcccaaagtgctgggattacaggcgtgagccactgcgcctggctgctttttaatttttttggaaaggtaggggggatttggtcaatgattaatccatctggagtttggtaacggatccagcaggtatgtaaggcattttagttatttgattctaaatgaaatcccaaaattgtaggggcaattaatcatgaacctgagggctcctgagttgtctttgcttgtttgcctcaagacaggtgacctgtctccttttttttttttctttaagtatttctagacatgtcatgattttcagatatttaacactttttaaaagatttgttttcctctcatgggaaatttccctgtcacagttggatctagtttctctttctatcttgtgcctggtttttagttaatcttctcctatgtgtcaaataatcgaagacccttcagttatttattgattgggaacccttcacttactggtatgcatttagttttacatatgtgagatcgtttagtgtttcacatcacccctactataattttatatcggccaggcacggtggctcatgcctgtaatcccagcactttgggaggccaaggcaggcgaatcatgaggtcaggagtttgagaccagcctggccaacatggtgaaaccccttctctactaaaaatacagaaaattagccgggtgtggtggtgcgcgcctgtagtcccagctacttgggaggctgaagcaggagaatcgcttgaacccgggaggtagaggttgcagtgagctgagatcacgccactgtgctccagcctgggcgacagagtgagattctgtttacaaaacaaaacaaaaaaatttatattaccccattttatggatgaagacactgtggctctgagacatccccttgactatttcatggcagggcaaagattcacaacttgtccctaactgccggatgcaccgcttcccttccttgagaaaactggcccaggctctcccaaaatccaggggaccagtagcaggatttctttcaagggcatcttgtcttccggtcaatgttttccctctgtaaaatggcattagtagaacctacttcataaggttttgggggagattaaatgagatgaacaatatagaatgtcatgtgtgcactcagaattacaattagttattactgataatgggtaaacataattgctattattattaacactgacatagccttactatatgtggggcattgccctgagcatttgtatagtaacatataattctcccagttactttgtgggagtagtaaggtctagaaccccctttttttttgagacagtctcactctgttgcccaggctggagtgcggtggtgtgatctcggctcactacaacttctgcctcctgggttcaagcaatcctcctgcctcagcctcccgagtagctgggattacaggcacccaccatcacgcccggctgattttttgtatttttagtagagaaggtttcaccacgttggctaggctaacctcgaactcctgacctcaagtgatctgcctgtctcggcctcccaaattgctgggattacaggtgtgagccactgcgccccgcctagaccccatttttggatgaggaaactgagacccagagaagttcatttagctgtggtctgctgtgacagggagatctgccacttagaaagttttagggtcgttttattttcataatagaacacgatgaaccagaccatccctgctccattttagaccattaagtttctttttttttttcttttcccctgagacagtctcgctctgttggccaggctagagtgcagtggcatgatctcaactcactgcaacctctacctcccgggctcaagcacttctcccgcctcagcctcccgagtagctgggattacaggggtgtgccaccatgcccggctaattttttttgtatttttagtgaagacagggtttcaccatgttggccaggctggtcttgaactcctgacctcaggtaattcacccacctcagcctcccaaagtgctgggattataggcctgagccaccgtgcccggcctagaccattaagtttcaataatgagaaagttgggattccccagagatggggattctctttctcatagtaacaagacttcccaaaacaacatttctttttcaagacttcattaagaatctcttgtctgtatcttggtcttttgttgttattgttgtttgtttgtttttttatttactttgttcattcctacctctccaacaaagaattttgaggtttggggcacccagatgcataattgcataatagctatatgtatttctcagatagggttaaggaaatgggcaaaggagaaataagaataaaagataagaggagagccgggtgtggtagtgtgcacttgtattgccagttacttgggaggctgaagcaggaggatcacttgagcctaagtgttccagaccagctggggcaacatagagagacccccatctctaaaaatatgttataaaatattttaattactttttttttttttgagatggagctttgctcttgttgcccaggctggagtgcaatggcacgcttttggctcactgcaacctccgcctcccgggttcaagtgccccagactcccaagtagctgggattacaggcatgcgtcaccacacccagctaattttgcatttttagtagagacaaggtttctccacgttgatcaggctggtctcgaagtcctgacctcaggtgatctgtccgccttggcctcccgaagtgctgggattacaggcgtgagccactgcgcccggcttaattacgatttaagaaaaaagatgagtataggaagaaggttggatagtgatgtgtttgccacagacctagatccctgctaaaagcagaccacagatttgactctgagcaaagaggaaaacaagatcagttgcgtaattaggtttctatgagttaagcataaatctgttccttagagaggatccagtttctccacagagctcttaccttcatgtgattttggcaacagctcttaataccttggactttccattgatatttgtcattttgcagctaatacatgttagttgtggggaaaactttggaaaatatagatagctaaaagaaaaaagctgggtgcagtggtacatgcctatagtcccaggtgttccctggaggctgaggtgagaggatcagttgagcccaagtgttgaagtccagcctccatagggagataccatctcttaataaaaagaacaaaaatatttaaattgtgtgtaaagtcactatctagatatcaccaccggggaacatttttgtatacatcctcctagaagtaaggtctctattattatcttatatgttgtaatataaatgcaagtataagtaatggcattttactaaagtaaatcgttatccaacactctctgcctcagggccatggtgcctgctgttccctgtgcccagagcacccttcccccaggcatcctcatgccactcttgcttatctctttccagtctctgctcaaactgccccagttctcagcagagtctgtcttggataatagctcacatctatacccttgtcactgtaccgcctaccctgccttttttccatggcactgattactattcaatttcatgatctgcttgtctccctctctttgaatatgagctccttgagggtgggtctgttttgttcattgctgtacttctagggcttgggctcagaattctgcccagcatagaggaggtcctcagatatttgaatgactccacacagctatttctgtattcattacaaatacatctatatcaataactactgaaatatgcctatagaaatgtttcatacagttagatttatgtgtatactttttttcaaaatcatgctcttgctcttcctacttcaatgtctgttggctgctttctgattcctttgaggcagcacatggtaagatgcctctaaattgtaccgtggcctatcaggtgttcatagaaaaccctctgcaaatggaatttctttttttttttttcctctttttaattgagacagggtctcactatgttgcccaggctggtcttgagctcctgggatcaagagatcctcccgcttcagtctcccaaagtgtggggattataagcatgagccactgtgcccaacctgcacatgtaatttcataattaaaatattttatccatggctgggagtggtggttcacacctataatcccagcactttgggaggccaaggtgggagtatcgccggagtccaggagttcaagaccagcccgggcaacatagggagaccccatctctacaaaagataaaaacattagctggggcctggcgcggtggctcacgctggggactacaggtttatgccatcacgcctggctaatttttttgtattcttagtagagacggggtttcaccgtgttagccaggatggtctcaatctcctgagctcgtcatgatctgcccacctcggcctcccaaagtgctgggattacaggtgtgagccaccgcagctggcttttttttttttttttttaaagaaaatggtagcctctgatggctgctgtcatgcccccggttgttttcaggtccaagtctatctggagacctttcctccctgtcaattaggggtcctttcttggctactattatgttgctttcttcatctttgcctcagaatcataaagttggaagggcttttggggccacctggcctagccctctctgccaccaccaggtgtgtgctctggggagctctgcctcctgtcctaaaactgtcaccttcctgactgggcctgtcttccacaagacatcgcctggctagaccccctctgactacatcttttcctgtgcctggaaggacctcagaggtaagtatttgggtctcttgtgtcccatccccactcccggagcccaaagctcagtccgcagcacatagagggcccttaggggatgttcatggacagctgaatgactctgcctctgccttcaggtgggtaccagccagttgacatccagattcattcagagcctgctgtgggccaggcaccagcctcgcaccttcagggaacgtggcaataaataaggatttcagagggcagcacattctagaaggatgtaaagcagtgaaacggggtagggagtgcctggggtagtggtgcagggcccctttagctgaggagtggatcaggcaggaggatgtttgtgtggtacctagtggtagaaaggaggacaccatgaagagagcagtaggaagagaattccaagcagaggaacagcaagggctgagagcctgagacaggaaggagcgcagtgtgtggagtgggcaagaggcccagtgtggcagggcctggtgggtagatgggctcacaggcgggagataagctgggaggggaaggcagaggctagagctggtctctagttttttagaccttatcttctgaaggacagataagtgcctctgcctccatcagcttccaccgagacgaagtgatgcaaaccagaccgtgcagccaactcctgcgtcaggttccataggaatcctttccccgccagtggaggaggctctcccgtcttttggaaatgatgtgcaggagacagagctgattctcatttcttccatggacacggctaagtgcgggctggtgtgtgagaaagggttcggggcgcgtggttggtggaagttagctcctggctgttctgccttgcagtcccaggcaactcagaccttccctggctgctactcacacctacgctttcctacgcaggctctgatcttctttttcagccctagaatcccagaatagcagctaatgtgtattgagcccttttttctttttctttttaagacagggtctcactttgtcacccaagctggagtgcagtgcagatcacagctcgctgtagtctcgaactcctagtctcaagcaatcctcccatctgagcctcccgagtagctgggaccataggcacgtgccaccatacctggctaatttaaaaaaattttttgtagccgggcgcggtggctcacgcctgtaatcccagcactttgggaggtggaggcgggtggatcacaaggtcaagagatcgagaccatcctggccaacatggtgaaaccccgtctctattaaaaatacaaaaattagctgggcgtggtggcgcatgcctgtagtcccagctactagggaggctgagacaggagaatcgcttgaacccaggaggtggaggttgcagtgagccgagatcgcaccactacactccagcctggcgacagagcaagactccctctcaaaaaaaaaaaaaaattttttttttgtaaagagatctcactatgttgcccaggctggtctcaaatacctggcctcttgcctctgcctcctaaagtgctgggattacaggcgcgagccaccgtgcctagcccattgagcttttattctgtgtctgacagtgctaaagggctttacgtggattaacttgttgaatcatcccatccccttaggaaatagagaccatcactatttctgttttgcatatgaggaaatcgaggcaggcaggagaggtgaaatcacatgcccaaggtggcatagttgataagtggatctggggcttgaacttgggtcgtctgacctctgacctggggctctcaaccacttaatgctacactgggaccctgacttaaggactcagggtctaggctccttatctcaaaattggccccgtgttgccacacaacggccaatcgcatatgtccttgccttgcttaccacctaatcgggcaggcctagcagacagggacactgcctttcttatcctcttcgtgccatgcatggaagggcggggctccattagaacttggaagcttcctctctaatttatggtttgtccctctccaacatatgggagagatagataagtctctttaattagttcactaagattaataagccatagacccatcaaggaaaattcaataaatgttcactgggcatcttttatgcaccaggctctgtctacattcagagcgagagaacagtcacagctgacatctatggaccacttacaactggcctggctctgggctaacccgcaccgtatacagatcttatatatacttcactccataccctgtgatgtaggtcttcctcaaaatcaccacactatgtcaaattgcccatgaaaaacaccagacttaggctgggcacggtggctcaagcctgtaatcccagtactttgggaggccgaggcaggtggatcgcttgtgcccaggagttcaggaccagcctgggcaacagagtgagaccccatcctaacaaaaaatacaaaaagtacaaaaaaattacctgggggtcccagctacccagaaggctgaggtgggaggatcgcttgagcctgggaggtcaatgctgcagtgagccatgattgtgtcactggattccagcctgggcaacagagtgacacccagtctcaaaaaacaaaaacaaaaaccaaaaccaccaggcttatgggaaagtgggtttaggagctcagcactcaagaacttcatcgtaatacattagacaaaaagaattttgcttgtggaaatgggtctctaaagggttgtggcttgttataagtggtggaaggagaattgtctgaaatgagatggaagttgtaacaccaggtgtggatgggtgaggtttgtaacatgtgaactgaggcagctggagaaggtgggtgttttgtgtgttcccgtgcttcagctagatagagtcttctgcattcacctagtgttggttggagacaaaattgcacatgtgagcaaccttgacattgagttatactcaagttattttcctttttttttttttttttgttgagatggagtcttgctctgtcacccaggctggaatgcagtggcacaatcttggctcactgcaacttctgcctcccaggttcaagtgattctcctgcctcagcctccccagtagctgggattacaggtgtgcaccaccactcccagctaatttttttgtatttttagtacagacggggtttcgccatgttggccaggctggtctcgaactcctgacctcaggtgatctgcccgccctggcctcccaaagtgctgggattacaggcgtgagccagtgcacccagcctgctcaagttatttcctaatacatcattcacattgaaacacatttgcattttcaaaacaaggattattgaagaactgactgtattatctccaatttgcagtaaagtaaactgaggctctgagaggtaaagtgactagtccagggtcccacagatgggaggtggcacagccaagatttaaactcagcttgagcacttaacctgtgtgccacagggctcttcctgttcatatccatgagaaacaagttatgtggacaaagatggccaagacgagagattggtggagtatggccagtagttaagaatatgcaagaataatgttttatttatttatttttaagacagggccacgttctgtcacctaggctagagtgcagtggtgcagtcatagctcactgcagctcaacttcccagcctcaagcgatcttcccacctcagcctcccaagtagctggcagtacaggcacacgccaccacatctggctaattttaaattttttgtagagacagggtcttgctatgttgcccaggctggtcttgattcctggcctcaagcaatcctcctgcttcagcctcctaaagtgctggaattacaggcatgagccaccgtgaatggccagaagcacagttttaaaatgtttgttgatggctgggtgcggtcgctcatgcctgtaatcctagcactttgggaggccgagtcgggcagattacttgaggtcaggagtttgagcctggcccacatggtgaaaccccatctctactaataatacaaaaattagctgggcgtggcggtgggtgcctttaatcccagctgctcaggaggccaagataggataattgcttgaacccgggaggcagagcttgcagtgagccaagattgcaccactgcattccagcctgggcgacacagcaagaccctgtctcaaataaataaataagtttgatgatgaccagtacagcctggaccctttgcattcaacgtggtgcactccatcctgggtgacagagcaataccctgtcataaataaaataagtaaagtttgatgaccagtacagcctggaccctttgcaatgaaagcggatgcctggtgtttagtgctcaagcagtgctggggccctgggcagcagctggagggtgggcactggggaggacaccaggaggctcagagcaaaggctactcaccaactgatgggacttttcaatatttcaaccattggtgtggttgttgtcagtccatactgggtgaatctcagtcctgattttatctgaaataaatccacgtggttagtttggttagttctcattatagaagcccctccccatccccaaaacttctaattatggaaacttaaatacataaaagttgagaaatagtacaatgaagccaagcatggtggtgcgcacctgtggtcccagctactcagaaggctgaggtgggaggaatgcttgagcctgggaggtccagggtgcaatgagctatgattgcaccattgcactccagcctgggtgatagggcaaggccctgtctcaaaaaaaaaaaaaaaagaaaaaagaacaccctcattttacaattaacattgtcatatttgccttctctgtgtgtgcctcttaagtgtgtgcgtccgagcatgcactttatgagccatttgaaagtacgctgcaggcatgtttcacccctaaatactttagtctgcatctcctgaaccacaatgccattatcacaactaagaaaacgtataatgtcatctaacatccaactctgatggcaaatattcccaaccatgccaagaatgtcttgtgtttattacaaactctcacatgcaagtcatttcaaacatcacctcccgagatccttgtgtacccagaagggaacatgagaagagaaggtggtgttcttgcctttggtttgcctaaggccccctttttgttctcccactttggattcggttggattctaggagcagttacacatttctgtttttgtgtttaaaagcatgtaggtttcatgtaagctatatgcatgcacacactagccacacatgggactcaagtttgtaatttaaaaagacatttccttcccctataataaagcatagctggcatttctacatctgaagcgtctaagataaagctgatggtatcagcatgttgctctccaaagaaacaaaaggttatgatttgatagaccctgaaattagacatcaaggtcaagaaagtgtaaacttaggtgtggtcgttttccaaagctgtcactcagatgtttagcaaaatgtccccctttacatttcccctgtcttccacaggtctcccccatccacccaaaaggaggaaagttaggagggaagattgtcaaaagtcctcaaatatggctattttagatttctttttttcttttggtgagacagagtctcagtttatcacccagactggagtgcagtggtgcaatcttggcttactgcaacctctacctcccacccccaggttcaggctactcttgtgcctcagcctcccaagtagctagctgggactgtaggcacgcaccaccatgcctgactaagttttgtatttttagtagagatggggttttaccatcttgaccaggctggtctcaaactcctgacttcaagtgatccacccaccttggcctcccaaagtgttgggattacaggtgtgagccaccgcaccaggcctattttagatttcttttaatgtagtagcaggtaacaagcatagttcatatacttttactatttttaataatgaccaacgtttcctgaacatgaatagtggattaaagtgctgagtggcatgcctggtgcacagcaggagtccaatattagctatggacagtacctgacattcagcggatttgaatcattcagacttgaaactgcactataatattttacttagtaaaatctcattaaaaattttttttaaatagtatgttttgtagagacaggggtctcactatattgcccaggctagtctcgagttcctgggctcaagctatcctcctaccttggctttttcaaagtgctgggattataggcatgagttcctgcacctggcataaagtttcattttatattgcagcttttaaagaatgggagtgcatcacatctacttttaaaggaaagctgagcatgttttgagttatgcacagttttcagcaaaacagcccatgcatgaaatccaacaggcttgtcagattaggctggtcactttacattatatactttctcatgtagttctcacgacagtcctgttatttagagattgccattcggcccatcttatagagaggaaactaaggcttagagagggtaagtgacttaacctcaagtatgtctgagtggtggagctgaaacctcaatcttggtgtggctgacttcagacttgttacttgtaaccaccgtgcagtcccaagcttgtgtttgttgctgttccaaatgcaacattggtgcctctaagcctcatatcatgaactggttcagagagagaaagccacagtccccccaggttcatttagtgtgtgttcaggtgtgttggcatggtgcttccttcagtctttctcaagcctcataggcagaaaacccttcatgaaagcatagtggtcaagagccacgggctctggggccagacggcctgtgcttgctcgaattccaggttcacaccagtaacttgtaagttatgtgaccttgggcaagttactcaaccctcatatgcctcagttttctcatttgtcaaatggagacaataatagtacctaattcatactattattatgaaaataaatgactaatataagcctggcatgcagtgtgctctagagcattagctgctaatattatctctgccaccaaaggctttagccaagactgccttcaaaagcagtgtttgtggggtggtagtgttctagaaaaggtaatgtttcctttttttttttttttttttttttgagaagggggtctgattctgtcacccaagctggagtgcagtggtggtgcaaccacggcttattgcagcctcgacctcccaggctcaagccatcctcccatctcagcctcctgagtggcttgactataggcatgcaccaccacacctggctaatttttgtatttttaaattttttatttttatcattatttttgagatggggtctcactctgttgcccaggctggagtgcagtggcacaatttcagctcactgcaacctttgcctcccaggttcaagcgattctcctgcctcagcctcccaagtagcagggactacaggcgcacaccaccacgcccagctaacttttgtatttttagtagagatggggttttgccatgttggccagactggtctcaaactcctgacctcaggtgatccacctgccttggccttccaaagtgctaggattacaggcatgagccaccatgcctggccagaaattggacactttatttatttatttatttttgagacggaatctcgctctgttgcccaggctggagtgcagtggtgcaatctcagtcccctgcaacctccacctcccgggttcaagcaattctcctgccttagcttcccaagtagttggggctacaggcacctgccaccatgtccagctaatttttgtatttttagtacagacggggtttcaccatattggccaggctggtctcgaattcctgaccttgtgatccgcctgccttggcctcccaaaatgctgggattacaggtgtgagccaccgtgcccgaccaattgtacactttaaattggtgaattttgtgttgtgttaatgatatctcaatattttttgaaatgccaacagggaacaaatcatcattagtgaaacagctcttgttcagattagtaagtagagctccagtcctgagcttttagtaaacaattgtgagccccagtgattccacgtggtcctgccctatgtgtagagccttggtttgcagccttcccagaaacagaaatgcttctgggaaaccacagctccctacctgctgaaggaaatggacacctgagataagctgaatatattgtgtgtgtaatcagaaggcaggcaggcaggccggttttccagatgagcctaagctaatggcttaaaagggtgtttaaaagagaaagcagtagcctgactggtctgaactcctgccctgtcagcagaaacggtgcagtcacaatgagaagggaaagagtatttaacgctggtatgaacggcaagcctctgcctcctgatttagttaataagcagttttcctatggaattgattgagggggagagaggtttttctcttcctggctcccttggtgtgtgccctctcatgtcagaaggcaggaagttctctgggaattcacaccagaggttttgccattatttaagcaaattaaggcctttgggaacagccaggtggcctttcaggttttgtcagggccaaaaagccctatcacctgccaaggtgttgagtcaacttatttacagtgctcagagccagttcctgtgctgctgaaatccctgaaggcctgctctaaatgggcctggtcagacatcaacaccgcctgcctcatcagcacttttagccttccacctgcagtgcgggcttgactgagatgccccagtggcttgtcctgggaaaactgctcccatctgtaagctgccaccctcctttggtgactttgcctctctctgcctctttactccctgcacagaggggcaaagaggcacatcctccagggaggcagggctaggtggaagttaaggtgatgggctttggggtccggcaggcctgagttcaattcccagctctgctgtgtgctgttatagctacgtggccttgggcaaatcccttaccactgtgagtattgctttattcacctgtgaaatgggagtaacacggtacctaccttctaggctgttgtgaagattaactgcaattctgcatggtgcttctgatagggtcagtaactgaggggttggccgggcacgatggctcacacctgtaatcccagcactttgggaggccgagcaggcaggaggatcacaaagtcaagagatcgagaccatcctggccaacatgatgaaacctcgtctctactaaaaatacaaaaattaattgggcatggtggcacatgcctgtagtcccagctactcgggaggctgagaagaattgcgtgaacctgggaggtggaggtgacagtgagccaagatcacaccactgcactccagcctggcaacagatgagtgctgggggtgttggagggaggctggagaatgaaagggaggcaactgaggccacagtgtctggctgtttccaatccccccatccccagctgaaaccctctcatctgcagataactccaagacactccttacttctcccagaataaaagcccggctctctacaatgaggctccagctacgtctgactttgtcactgactacccttgtgtcactcgctctactcagccaccaccctggattggcttccaaccaagttgtgtttgcttttccctctgcctgaaatgtccttccaaaggggaccgtgtggctcccttcctccctccttccctcccttccagcaagtcttaggtctcagctaaaactgcctttgctctaagtcaccttcattgcctttgacatggcacaccactgcctccagcactccctccttatccttcctccctgtttattttattttattattttttgtttatttattttgagacagagtctccctttgtcacccaggttggagtgcagtggcatgattttggctcactgcaacctgtacctcctgggttcaagtgattctctcctgcctcagcctcccaagtagctgggattacaggtgtgcaccaccacacctggctaatttttgtatttttagtagagatagggtttcgccatgttggccaggctgatttcaagtgatctacccatctcgacctcccaaagtgcttgggattacgggcttcggccaccatgcccagcacctgttctattgttttctctacagcgtttactaccttattgtatgtttttggctaaagggccttggagtcaaccccaggagaacagtgctgatgaatcaggagtggcgctcccataacttcatgcgtcttcaaagctggctagtactgcacctcattctcgtgatttcatgcccacagttacctccagggtgttggctgagcagagcaagtgacatgagggtagttggtgacaaagtcagaagtagctgaggcctcactgtagagagctgggcttttattctgggaaaagtgagtctctggagggctctgcatagagcagaggcttgtcatggcctgaccgaggttgtagcaagctcaatgcggctactgtgtagagaagacgccgtagcaacctgggccagaattgggaagattaaggagctactgcaatggtccaggagtccagagatgaattgagtctgtggggaaaaaagtgtcggctgacaagccgttctgtctccatgttctcctctcaccttttgaccaccctgtccccactcctcagctgtgctttgtattttgtaattcgcagcactcaaagcactcacacaggaggcctgacattatttatctgcaggtcagagggtttgagttgagggtgggggtattggaaacaattaggcattgtggcctcagttgcctccgcttcattctccaccctcctccacacacccgcagcactcattttaacccctcagtatgtcttttactttttccttcctttttagagttagggtctcactctgtcatccaggctggtgtgcaatggtgtgatcacggctagttgcagccttgacctcctgggctcaagcaattaactccacctcagcctgcccagtaattgggactacaggagcatgccactacacctggctaattttttctttttttagagatggggtcttgccatgttgcccaggttggtgtcgaactcctgagctcaagcaatccatcccccttggcctcccaaagtgcggggataacaggcatgcaacaccatgcccggccaattttttaattttctttattgacagggtctcactatgttgcccaggctgatctcaaactcctggactcgagtgatctccctgccttagccaaactgctgggattacaggcctgagcaatcatgccgggccccctcagtatatctttaatccctttgggatctgagactctttgagagactgttgaagaccacagagcctcccacaggtgcccatatcttaacccacagttccagggggcccatgccttccttgatgcccttcactagcccaaaccttggctcaaatcctaggcactcactgctaaggcctcaaggagggggtcagaaaaacaaaaccgcagcccaggaaactcctttcatggccacagagatgtttccagatggcctgagaagggagtggttggtgtgggcagctgctgttccccatggtatcaaatctttgatcaagaggggtggaaaaggattgactttctcaagttcagggcttccttctggctccacaggcaccccccacaggcaagggaccaccacacccaaaggcaggagtggccaatcctgagggcgtggacgggggccacagggaggcagtccacaccctcaggatttgaccctacagggaaggccctggggatgttgccctgtcccaggaacctgcacacccaccttgggggcactgcctctccttagggtgacctcagaggcagttgcagaagtttcgagttctgcaaaagccatctgtggcagaacaggagcggcagcttaccacatacaaactcttcaaatgttcccaccaactgtgacaggtgggggccactctgtagttgaagaggaaactaagactcaagcgtttaactttcctgaagttaacacagctagtcagaggcacagtttgcattcaagtccacatctatctagactccaggcctaagcgctgaccgttagtgctctatgaggcagcacctggtaaagccacctgtgctttgagggggcgttcaggaggctacagcctagttctgtgtagggtcagattatcttgttctttcttctctccgctggcccacatcttaccctctggtgccattgtgaccgatccttcgcaaaggagtcagccctagaattgttgacagtgagcccgtttcctgcccctcaccccacacagggttccttcccatccttgcccctccgtccctggaccagctccatgggtcagtgttcctcttagagcatgactcttggaaaaaaaacagcacttatcattgaggtcatcagattgcaaccctgagaatgtacttatcaaaccacaaatagaatcagagaaggactatatagtctcccatatcctaagtgtctcatttctgaaaacacaactgaaatctggttttggaagccacatcacatgttgcctattgagattacggtcaactgaacacccatccctcctttggttcaaccctctcattaaagaaaagaaaaagggccgggagtggtggctcactcctgtaatcctggcactttgggaggccgaggcaggcagatatcctgagctcaggagttcgagaccagcctgggtaacatggcgaaaccccgtctctactaaaaatacaaaaattagccaggcatggtggcacatgcctgtaatcccagctactcaggaggctgaggcacgagaatcgcttgaacccaggaggtgaaggttgcagtgagctaagatgatgccactgcactccagcctaggtgacagagtatctcaaaaaaaaaaaaaaaagaaaaaagaaaaaaagaaaaaaaagtttgtttatgtgaacataggaaaacaaacacaagccaatttaaatggtacctaagagcctaaaagtgtctgcctgtcagcagttcatctgagacaagcagtgttaccgatttcttgtttccttctgaagatattctaagcctattccctatcccatttagctgtgtgctctttaaagacagattcttcccatattattacatatacacttacttgattcttttttaaacagctccctcattctttttattttatttattttttttgagatagagtctcgctctgtcacccaggctggagtgtagtggcatgatctggactcactgcaaccctcacctcccgggttcaagcaattctcaagcctcagcctcccttgtagctgggactacaggcacctaccaccacgcctggctaatttttgtatttttagtagagatggagtttcaccatgttggccaggctggtcctgaactcctgacctcaagcaatctacccacctcggcctcccaaagtgctgggatttaggcatgagccaccgtgcccagcccttcatgatttttaatttttgcatcattttccattgagtggatgcccatcattgatttatccagccctctgtcaatgatgtgtctatcttttgccaccataaacaagattgtagtggccctccgtatatctgccctgatgcaatgtgtgagtccctctgtgagatgaagtcctaaaaatgggctttgctgaaagaaaggatttatgcatgtaaaatctataaacatgatcagaatgttctcttaaaaagccatactgattcctacttgccatgatgtccaaggccttggagccccacatctttgctggtacagttccgcctctgtgcattacagatgataaaacgaacccagaaaaaatgcaggggtcttgcctgacattctccagagagaatctggtcatctgactctggtcaactgacatccagcattttttttttgctagaccagctgaccagcatccgccggcagcacccccttccctctcccatcatgtgtgggtcatcctcctttccaccgcccacatggacccctccctctggtctcctgcatcctgcatggtgttggttatgtgaacaagttctttagtggtgatttctgagattttggtgcacccatgattggagcagtgtacactgtacctgtgtacactgtgtagtcttttatccctcacccccttcccaccctttcccccaaagtccccaaagtccattgtatctttttatgcctttggatcctcatagcttagctcccacttatgagtgagaacatacaatatttggttttccattcctgagttacttcacttagaatactaatctccagttccattctttttttttttttaacagcttataagttcctaggtccagtgtttcctgtctctaatcccagtttctcaggagggtgaggcgggagcaggcccctcctaccctcctgttcggtcattttagcagatgactttcaccctcatgccttttgcactgtgattgcaagaagggattatttttaactttatgaataggttatatgttcacatggacaccattgaaaaaaaaataatctaaaaagtatacaatgaaaagttctactcccaccctgtctccctttgttctaataaggtgcctcccccatacctaaaatctcacttgttagtgtcttttaaagttctatatgtaactataaacaaatatgaacatatattctttgagacagagtcttgttctttttttctttgagatggagtcttgctctgttgcccaggctggagtacagtggcgcgatctcggctcactgcaacctctgcctcccagaatcaagcgattctcctccctcagcctcccaagaagctgagactacaggcatgcactaccatgcccagctaagttttgtatttttagtagagacacggttttaccatgttggccaggctggtctccaactcctgacctcaagcgatccacccacctcagcttcccaaagtgctgggattataggcgtgagccactatgcctgaccaagacagagtcttgttctgtggctcaggctggagtgctgttgtgcagtcgtggctcactgcagactcaaactcctgggtttaagtgatcctcccacctcagcctcccaaaatgctgggattacagggataaacttatttcttatccccttctttttagttacacaaaagatagcactgctttgcacttgcttttatcagcaaacaataatgtgtcttgacgatcattcccctgcagagcataaagagcttttttttttttaataggttcatagtatttcattgtaaggaaattctataattgatttaaactaatcctctattgatggctatttgggctgtcgcccatgttttgctagcacaaacaatgccttagtgaataaccttttacatacgtcatttttgtgtgcaagctttccagtttcacatcggaaaatgggaacagtccaggtaaatggcccatggagcatttctgcaagagcagcaaccaggaaaataaaaggctggagaaccactgctggaacaggtgccccatctccttgtggtggtagcaacagtaccacagcatcttgtgagtgacctgtggctgttctccagtgtatgccagagtcagattctggcacctgtgggtcactcttcttcatgctcttttcttttcttattatttttgcctacttggaattctttttttttcaaatttgagacagagtcttgctctgtcgcccaggccggagtgcagtgatgcgatattggctcactgcaacctcttcatcctgggttcaagcgattctcctgcctcagcctcccaagtagctgggattacaggtgcccgccaccatgcctggcttgtttttgtatttttagtagagacagggtttcaccatgatggtcaggctggtctcgaacccctgatctctggcgatccacatgccttggcctcccaaagtgcggggattacagggttgagcctgcacctgaccctacttggaattcttgaagtgagccccccagtctgagatctttctgctttctttttttttttttctttttttttttttttttttggtattcaggaggatgcagcatgggttgtaggcttcatttctcaggagcctgagccaaggcacacatatagtctgagcagttacctttccaggcagccagagtagattcagcaaatgctcttggaagcagctgcctttcccatcaatgcttatttgttcttgataatgaaaaatgatgctagcatccattaaaagagaaaaggcatcctcttgtgagctctattggacaagtgagcacttgttgtacagtcatctgcaagcacatgtgacctggagactgtgggaaatgcctcacttcgcagtgttggctcccagctgttctcttgggctgtttgagttttgttccaaaggtcagaggcagagggtccgagcctttccagcacagcccacatttgaaagtagtgcaagcctcacattcattctttgtagaaggtttccagatcttgttcttgagttattgaatgattcaaaggttctgaattccacaacggctttcctgtgtttttgcagccagattcagcacattttggtgtcagccagtgcttggaaaatgtggccctagattgatgcgtgtttatatctgggttgtgttttttatagagaataaatctgtggttacttttacccatcccacattgctgttaactacccctggaatttctctccctccgcaagcctagtgctgaagaacagaagctttggtgctggctggttctggggcgaatgttccttcagaggctgacctgctctgtgaccttgacaaggccctgaccttgagcaaatgacttaagcctttcgcctcagttgctcatcagcattaagggggttaaaaacccctacctgcctcacagcaacataggagtcaatgtaaagttcacagtgcccacacgtaatgactgtcatagtgaatatttactctcaaaaagattttttgttttcagtttttagttgttgattttttttttttttaaatagagatgggatcctactatgttgcccaggctggtctcaaactcctggcctcaagtgatcctcccacctcagcctcccaaagtgctgggattacaggtgtgaaccaccatgcccagcctataactattgttttgttttgttttgttttttggagatagagtcttgctttatcatccaggctggagtgcaatggtgcaatctcagctcactgcaacctctgcctcctgggttcaagcagttctcccacttcagcctcccaagtagctgggattatagacacccaccaccacgcccggctaatttttttttttttttttttgagacagtttcactcttgttgcccaggctggagtacaatggcatgatcttggctcaccgcaacctccgcctcctgggttcaagcaattctcctgcctcagcctcctgaatagctgggattataggcatgtgccaccacgccccgctaattttttgtatttttagtagagacgaggtttcaccatgttggccaggcctgtcttaaactcctgacctcaagtgattcgccctccttggcctcccaaagtgctgggattacaggtgtgagccaccgcacccagcctactgttaattaagaattgtttatggcttctcttctctgcactttttcataaccttggcatttttgggtgcctggattctttcatttttgaaccataggactttgactgatggggtattcctcaagagaccctaatagctatatatttcttactggttcattgagatttaatttacataccacacaatttacccactgtaagtgtacagttagataatttttataaacgtacacagctgttgagctgtcatcacaatccagttttagaatacttccaccacctcccaagttcccttgggcctattggtagtcaagcctaactcagctccagacaacccttgatctgctttttgtctctagttttctagatttttcatatgaactgtgtactttggtgaacagcttctttcactcggtgtaatgcttttaaggttcatctatgctactgcgttttgtgatgtttgatcctttttattgctgagtagctataccatattttacccatcctaattactttttgggttgactgtatataagccacatttacacatttttttaaatgggtaaatgtgaaataagaagaaagttggggctgggcatggtggctcacgcctgtaatctcaacacttttggaggccgagacgggtggatcacaagatcaggagttcaagaccagcctgaccaacatggagaaaccccatctctcctaaaaaaaacaaaaaacaaaaattagctgggtatggtggcgggcacctgtaatcccagctgcttgggaggctgaggcaggagagtcacttgaacgcaggaggcggaggttgcggtaatctgaggtcatgccactgcactccagcctgggtgacagagcaagactctgtctcaaaaaatgaatgaataaataaaagaaagttggacaggaagatccgttctcactgtgtcacccaagctggagtgcagtggcccgaacatgattctctgcagccttgacgtccccagctcaagtgatcctcctacctcagccctcccaaataatggggactacaggtgcatgccaccatgcccagctaatttttttttgtattttttgtagagatgggctctccccatgttgcccaggctggtcttgacgggacttggactcaagtgatccgcccacttcagcctccccaaagtgctgggattataggtgtgagccaccgcacctggccaggtgtttaaaaatagaataatgtccagaacctaattttggagaacaggatgtaaagggatgcaggacaagggagtaaatgaattaggaaagggatatagaccaggatctgaaggacacatatcaggtgttagcagtggtctctctgcaaggatgggcttgtgaatactttgtgcgattggctcatcttttttttttttttgtaacagctttatcgaaacataatccacatagcatatattacaccatttaaagtgtagaatttaacagtttcccttatagtcacagacttaagcaagcgtcaccacaatcaatttcataacattttcatcacctccagaagaaatccctcactccttagttgctactgccccagccctggacatctggattcagttagtctgaggcaggggccctggctgagtatttttaaaaagtgccccaggaggctgggcccggtggctcatgcctgtaatcccagcactttgggaggctgaggcgggcggatcacatgatgttgggagttcgagacctgcccgaccaacatggagaaaccccatctctaaaactacaaaattaaccgggcatggtggcgcatgcctgtaatcccatctactcgggaggctgaggcaggagaatcacttgaacccgggaggcagaggttgccgtgagccaagatcacaccattgcactccagcctgggcaacaagagcaaaactccatctcaaaaacaaaaacaaaaacaaaaaacccaggaaagtctctgtgcagcacattagaccctgaatggaaatgatgttaggaggcattttggtgcatgctttatttcaccagtcggaatgtaagccttaccaatgtctgtgagggcccaggacttgttctcccacatctcaggcctgtcagctgccctttcctgcacggggcatcagggagagagaggaggagggatttagtagctttggaattcagtacatggggtctccctaacctcggggaatccaacagaaagaaaaaggaggaagaaaatgtgatgattttctttttaatcagtaagcaaacagttcctagagttgcccaacctgaccacaggaatgtttcctgggttgcagtccatgaaaatgatcagttacggcctctgtttcggcagacaggctgtgttgttacgcatgcagccacagctgggacaagaaagcccctccaatttgctgtgaacccagagggcctccccattctccttattctttttgagaaaatcaaacgcatttccctccctaagacaggtggggaagcagtccccctccagcctccgcctctgcaggaggcctaatgtcgctgccaactccttgctagaatggagatgagttgtttttctcccctcttcttgaaaacaaattgagatgagattccttgccagttggtgttgactctggaaaattgaaaccaagcagttggttttgacttgagcagagaagcaaccccagcttctccagtcaaggcagcagataccaatccaggcaggaatattgagatgaaactgagtgaggctgttaatcaatgggcacactggctgttgctgtcctctctgggagaggcctggaaagaaaaatgatttaaaactaagttcccttctggccttgttgtcaagaagggtatggggtatggggaggcaatgaggcaatctggcccgcaggagcaagagctaacctttctcataggcctgtgctaaaatcatgttaattccacttgaatgttggcccccgggtgggcaggagtggttatctgttgtgattgtggctggatcttcagtactagaacaggctgcccccatgcaggaggtatgcacacagtaggtgtgcaggctttgagtagaccttggaactgttcccccgcactgccgcctgctctctcccttacttcagcacacagctccaagctggggcagtctctttcacttccctttattccctaatatgccctaatattccctaatgtcctttatttagtgagttgtcctgcctgtcacataaagcccttggaaattccttacctgcttatatttctctattacacttttcattcctgatactttttttcgttttctttctttttggagatagcatctcaatctgtcgcccaggctggagtgcagtggcacagttacagctcactgcagcctcgacctcctgtgctcaggtgatcctcctgcctcagcctcctaaatagctgggactatagacacgcgccaccacacccagctaatttttaattttttgtagagttggggtcttgccatgttgctcaggctagtcttgaattcctgggcccaagtgatcctctcacctcggcctcccaaagtgctgggattacaggcatgagccaccatgattacttattgatttacttgttaattatctctttgacattgaaatgaaagccccatgaggtcagggactttgctttgtccattgctgtatttctcaggccttaggatgatgcttgacaaagagagtaagggctcgctaaagatttactggaggaagaatccttgaagcaatccctcaaaggaggtggggacgtctgcctatgtattttgtttgtttatttttttgagatggagtctctctctgttgcccaggctggagtgcagtggcgtgatctcagctcactgcaacctccacctcccaggttcaagcaattctcctgccttactctcccaagtggctgagattacaggtgcccaccaccatgcccagcttaaattttgaatttttgtagagattgggtttcaccatgttggtcaggctggtctcaaactcctgacctcaggtgatccatctgcctcagcctcccaaagtgctgtgattacaggcatgaggcaccacacccggcctaaacactgacttttttttttttttttgagatggagtcttgctctgtcgcccaggctggagggcagtggcgcaatcttgactcactgcaacctccgcctcccaggttcaagcaattctcctgcctcagcctcccgagtagctgggattacaggcatgcgccaccacgcctggctaatttttgtatttttggtagagacagagtttcaccatgtggaccaggctggtcttgaactcctgacctcaagtgttccacccacctcccaaagggctgggattataggcgtgagccagtacgccctgcgacactgacttttaatcaattccagaagcgccattcatgacccttccccccgggctggttctgatcaacacccatggcgtttgccgtcagagaaggaaacagcatttgtccaagcagaaccatggttgggaaagcaaaaagacaccctttgccagtgtgaccaagtcgcttgagtaatcttaaacaaagggaaaaagtcaagggcgatggcttacacctttagccttgtttctcccacttcagaaagtaaagggtaaagggtcctgggctaatttttccttaatcttcaatgtcactgttttctctctccacccccgtctgctttgatggggacagaagccaaggggactttgctccctgcttcccatccaggcagcgttcgttgttgacatctgttttcagggtgtagctcagtgaagacagagacgatacataatttgttctgggcacatatgtttgggggacgttagaaggaacttgataagcttcatgcaaataaacttccagtccctgggaacccatgggggtcgcctgtcaacaggggtgcaggagccgcagctgccaccctgagagcacattgcatggatgttgtgggcacgttaagagtcatgcttgtgcaacgtgatactccaacctgcttatcttccctggaaaaatgttgtggttgacgttggcagtttagaggaactttgacttatttcagcttatgcaaagtggtaacatacagcgagacctttttgaaactggagtatagtgtggctgttggaatatccttaggtttctctgaggcctggaactggatttccaaggctcaattttcatccaagaagagagggagtgtgtataatgatgcttttgccgttattctcattcaagttactctccaactgtcctattcttttgtgagaactaacttctcagatccattcagctagcaggcttgtgaatggctcatcagtactaacagacaggctgcctggtgagtcctggcggctaagtagcatcagactacagcttccgtcacttcatagctatggaacttggttaagttccttctctgtttccccatttataggaaagggatgctggccaggcgcagtggctcatacctgtaatcccagcacttggggaggccaaggcggatggatcacctgaggccaggagtttaggaccagcctgaccaagaggtgaaacctcgtctctagtgaaaaaatacaaaattagctgggcatggtggcgcatgcctgtaatcccaactacttgggaggctgaggcaggagaatccctcgaacccgggaggcaggaggctgaggcagcagaatcccttgaacctgggaggcagaagttgcagtgaactgagattgcaccattgcactccagtgtgggcaacagagcaagactctgtctcaaaaaaaaaaaaaaaaaaaaagtgggaggatgctaaaatccctaccacacaggactgctctatctaataaggacatagactgttgttgttgtccatagttttgtttttgtttttgttttttgatacaaggtctcactctgttgcccaggctgactgcagtggtgccatcacagctcaccgcagcctcgacctcctgggctcaagcaaacctcttgtctcagcctcccgagtagctgggactacaggcacacaccactgctcccagctaatttttgactttttgagttttttatagagacacggtcttgctatattgcctagggtggtctcaaactcctggacacaagcagtcctcttgcctctgcctcccgaagtgttgggttacaggcatgagccaccatacctggccgtgtccattagctcttagtagcaaatggacacacaacattagagacttatcatcaagtgagagtcagtgttcctggtggaacttgaatgtccttttcaacatgccctaagtgtggacaaactggaggcctaattgttctttcctttgcatttttatttttaaaaatttgttattttaatttttattactataattttagagatggggtcttactttgtcacctagggtggagtgtggtggtacaatcatagcacactgcagcctccaactcctgggctcaagcaacccttctgcctcagcctctctaatatctaggactacaggtgcaccaacatgccgggctaactttttttttttttttttttgagatggagtctcgctcagtcgcccaggctggagtgcagtggcacgatcttggctcactgcaagctccgactcccaggttcacaccattctcctgcctcagcctcccgagtagctgggactacaggcgcccaccaccatgcccagctatttttttttttttgtatttttagtagagacggggtttcaccgtgttagccaggatggtctcgatctcctgaccttgtgatccacccgtctcggcctcccatagtgctgggattacaggcgtgagccaccgcacctggccaaccgggctaactttttagattttctttttttggtagaaaatgaggtttcactatgttgctcaggctagtcttgcatttgtaaacataaaattaacattttctgctgagtatgaatgctcaataaacctgtaatgttactgatttcatgaatactcattaaaagaacacatgccagaatccccagtgtcatctaagaaaatagcctggaaggagatcttataggcagcagtatctgtggagatggagttagaaacactgtccctaaccagcaaaaagaaaaatgcctaactagctgaatgaggctgtctccccaggattcctttcatccatcaagttagatttctttttttttatttttattttaagagatggggtcttactatgttgcccaggctagtctcaaactcctgggctcaagtgatcctcctgccttggcttcgcaaaatggtgagattacaggtatgagccaccatgcctggctagttctctgatttttttgtttgtttgtttgtttttgagatggagtcttttttgctctgtcacctacactggagcgcaatggtgcaatctctgctcactgcaacctctgcctcctgtgttcgagcaattctcctgtcctggccttctgagtagctgggattacaggtgcccgccaccatgcctggctaattttttgtattttcagtagagacggggtttcaccatgttgaccaggctggtcttgaactcctgacctcaggtgatccacctggctcggcctcccaaagtgctgggattacaggcatgagccaccatgcccagccagttctctgatcttgtcctccagtttttatgtgtaactgaggctgagctctcaagttcaaatggtctttgaataaagctaaatgcaggccgggtgcggtggcttatgcctgtaatcccagcactttgggcggccaaggcaggcggatcacaaggtcaggagttcgaggttatcctggccaacatagtgaaaccccgtctctactaaaaatacaaaagattagccgggcgtggtggcaggcacctgtaatcccagctactcgggaggctggggcaggagaatggcttgaacccgggaggtggaggttgcagtgagttgagatcctgccatggcactccagcccgggtgacagtgcgagactctgtctttaaaaacaaaaaaaaaagaattgctaaatgcagtattctttggtgttcgctgtgggaaatgtgttctgatgagagggaggcaatccataatgtgcccctttgtatgcagggtgggcaaaacactgcttccaactagttacgtctaagatactaggttatcccactggttaccaaacaactcaactatggtttgctgccttccatagctggccctgtccttaaatcccaacatcgtctgaaaataatatagaagcttttgagactgtcttgtttctacccactcacattccagttatgggaccaggcgggcgtgggagaagaaacgggatcgtcaaagtgggactgttccgtgtggcatgatggcaatttcaagcaaggaatgttgctgaatgctcagagcctgccccaggaccaaaagcttttcatgaacttgggtttcatttgtatttgaacatcagtcatctctcttggggtcctctcttgaaagctacttttgcccagtaggctagaaagtggggcaccgtaggtttaatagcagcatgcagggatgacagagtattaaaaacactttttaaaagtcattcttactagtttttgtcatgaaaaaaaaaagaattcattctaattgtaacaggccaagtaatacaaggatatataaggaaaatatgttgttgttgttttcaaactgcctcctggccaggcacaatacttgtatctgtaatcccagcactttgggaggctgaggttggtggatcgcttgaggccaggagttcaagaccagcctgggcaacgtggcaaaaccccatctagtcctgtaaacataaaattacattttttgctgaaatacaaaaaatacaaaaattagctgggtgtggcagcacatgcttaaaatagagcatggcacattaatattctacacatgtttaaaatactaataaaataggccaagcatgatggctcatgcctgtaatcccagaactttgggaggctgaggcaggtggatcacctgaggtcagaagttcatgaccaggcttggcatcatagcgagaccctgtccctacaaacaataattaaaaatttgctgcggtggagtacacctgtagtctcagctactctggaggatgaggtgggaggatggtttgagcccaggaagctgaggctgcggtgagctagcgtttgtgccactgcactttagcctgggtgacagagtaaaaccctttctcaaaaaattaaaatgaggctgggctcagtcattcacttctgtaatcccagcactttgggaggccaaagcgggaagatggcttgagcccaggagtttgtgagcagcctgggcaacgtagtcagaccccatctctacaataaataaaattagccaggcatggtggcatgtacctgtagccccagctactcaggaggctgaagcaggaggattgcttgagccccgaaagccaaggctgcagtgagcagtgtttgcaccactgcattccaccctaggtgacagagacctgtctcaaaaagcacacaaataaaattaaataaaatctgaataaaatagttcataaaagctaattgaagcttagttgaggctgcagtttttgatgatggtgatgatattgtaatgaaaagactttcccagctgggcacagtggctcacacctataatcccagcagtttgggaggcagaggcgggcagatcacttgaggtcaggagttcgagaccagcctggccaacatggtgaaaccttgtctctactaaaaatacaaaaattagctgggcgtggtggtgtgcacctgtaatccccgctactcgggaggctgaagcaggagaattgcttgaatctgggaggcagaggttgcagtgagcccagattgcaccattgcactccagcctgggtgacagagtgacactctgtctcaaaaaaaaaaaagactttcccacatggagatggccagtagtggggagtggggtcttagcttcttttgttgggatttggtttttacaccaagtcaccaaataagtttatgaaaggtgggcatactgggttaaagaacacttagacccttgttagctttatttttgttagctttttttatgggcatgttgaaatatacccagtccccgtattctgatcctccagtttcaacattttgccattcttctttcctcccacttgctgggctcagagacaacccagcccttgccagcgtgacagtgagcttcccagagcctttctggagctgaagaacctttcaatctttcctacaatttcctataatcagcccaggggatcaggttgcatggggagataatgagtcttatgagcacctggaattcaggttggggctcctcgtcatactgtcacttctcaaagggtagggcttaaccaccattaagatgaggtgccccaaagcaggttaagtgccttggatcaagttatttgcaaaaccattttcattttttcaggccgccacccttggcaagtccaatcatgcttgtctcaactttcactgtctaaatttgggaaggctggagaaaggaattcagtgcagccttcattccctgtttacatgacaagcccctaaagatgacctagttgccccattacttctgctgggggtgggggaggactctttgaagagcatctggttttgctagtttgaaaagaaattcctattttagacttaaaaggatggtatctgcccatcctttaaggacttggcatttcttcttgattctttcatcatcttatggctcagctgttcagttaacaaacacttgtctacccaaatacacaggaataatagtcatctcttctactttcattgctttttaacttagaaaatgtcatcccattcactgtcttggtcttcacaaaaccctaaagaggtagactcaaacagtggtgataacctttatgttatagtagagaaggccaaggcccatagaggtttagcaatttgctaaggccacccagcaagaacatggcagaatctggttttataatccagtcgcagaccctgggtccagccctttttccttgtctctgtcttcccatcatttattacggctccccctgctcaccccatcctttccttcaagttgcggaagtgagttgtagacccagtctaagggctgagaaggtaggggttggggcatggtggtgattttttatttttattttttaaacaaactgggagggagggtcaggtgggcgactctttgaatgacacagctcccttcgtatgaacgagctcttcctggtttcgttgctcagtttatttgccaggtagcagactcctagctattgcatggggtagcctctgatctcagtcttagagatcaagactggagctggagaacctttcaatctttcctataatttcctataatcagcccaggggatcaggttgcatgaggagataatgagtcttatgagcacctggaattcaggttggggctccctctcatactgtcacttctcaaagggtagggctttgaatagatagattataggtataatctatctataaactaatataatcttccttttaaaaataaccaaggttggggccgggtgtggtggctcattcatgtaatcccagcactttgggaggcgaggtggatggatcacctgaggtcaggagtttgagaccagcctggacaacatggtgaaaccctgtctctactaaaattacataaattattcaggtgtgatggcacatgcctgtaatcccagctactcgggaggctgaggcagaattgcttgaacccaggaggcggaggtttcagtgagccgagatcgtgccactgcactccagcctcggcaacagagcgagactgtctcaaaaaaaattaatagtaataataattaaaaaaaaaaaaaaaaccaaggttggctgggcacactggcttatgcctgtcatcctagcactttggaaggccgaggcaggaagactggttgagtccaggagttcaagaccagcctgggcaacataacaagatcccatctctatgaaaatattatttaaaaaaaaaaaaaccaaggccttaatagggtctctccagagagaggaagagccaaccatgagactaacccatgttaaagggctgtctcagctctgccatttaatagttacaggatgtcaggtaaatttcttaacctctgtgagcctcagtttcatcttcaaaatggagaaaatctgttacttcccctctcacccccaaacgtggtcttatttttctctggcaagggcagggctattggcttcagaaatgtttgcaagggtggcccctgatggaagaaatgaaaactgctgcctaggcgtcagggatggcttcaagggctttctggcagaaacctgatcctcctgtctagccttgtaagataggacggcaggaatttttataaaagagaacttggatgaaatagaaattccatcggacaattatttgaaagggaggaaaacaggccaagctgagagtttcctagaatgaatggtcttatcgactgctcccctctgcctggaagcttctttgagccaggcttctgcaaggctggctccttcaggtcccagctcagatgggcctacctcagaaaggcctgccctcaccatgcaatagatgttacatcttcagcaaactcccttctcctctgccactcttatatcaccctcttttattttaatttctttttacctattaccactgcctgaaattttaagtttctgtctttgtccatctcttcctcagtagtgtaaactcaatgagagcagaaaccttaagtatcttcgtcacgattttgtcctcacagtccaacacagtgtctggcatatagcttgatggttacctatttgaatgagtcctttgagattctaatgtatagtgtagatgcttcaaccacagcttctccagttttagagtattaatactttttaaagttttagttacttttatttatttattttttgagatggagtctcgctctgttgcccaggctggagtgcagtggcgcaatctcagctcactgcaacctccaccttacaggttcaagagattctcctgcctcagcctcccaagtggctgcaattacaggcgcctgccactaaacctggctaatttttttttgtatttttagtagagacagggtttcatcatgttggccaggctggtctcaagctcctgacctcaagtgatctgcccaccttggcctcccaaaatgctggggttacaggcatgagacactgtgcccagtcgagaagttactttctagacaagataatattttcaattgacaagaagatgagaaagaaatcagagcacaaggaagtcatcctgtagttgtgaagaacattatggtgatagctttgttgttctgtcaccagattatggtttgttttggttgtgtttggttttgtgggagtcttcccacaagttcgctctttggagaaggaatgctcttgtctttaatctgtccaatttcctaatctctgtgatttctgccctgcagtgaattttgaagattgcaccggtcgacaaaggacagcctatttttccctcgacacccgattcaaagtgggcacagatggtgtgattacagtcaaaaggcctctacggtttcataacccacagatccatttcttggtctacgcctgggactccacctacagaaagttttccaccaaagtcacgctgaatacagtggggcaccaccaccgccccccgccccatcaggtatgttggcatttttctgagaagttcgctgttgttttagtgcgctgtctaatccaggtttctcagccttggtaccgttgacattttgggctggatgattttgtgttgtaggggttgtcctgtgcactgtgtaggatgtttagcaagcatccctggccttaactggttagacaccagtagcacttccaccagttatgacaacccaaagtatctccacatgttgcccatggcccctggggggacaaatcagcccaagttgagggctcttggcctaactgaataattcttgctggagtttttggggtgtggggatcgggtagtgtagaagagtggtaaaggcctgaacaccgtctgggactgaatctcagccgtgctatttactacttgggtaatgttggaggaattacgtcacctgtctatgcttgagcttccttatctgtaaaatggagataacagtgaggatggaattaattaatacatgtgaaatgctaaaaatacgcaaggcatacttagtcattgttagctgtctttaccactcccctcttgggggaagaagaatgaatgagagctggattcttctctctctctctcttttttttttaagacgtagtctcactctgtggctcaggctggagtgcagtggcgtgactcacagcaacctccacctccccagttcaagtgatcctcctgcctccacctcctgagtagctgggattacaggcgcccgccaccatacccggctaatttttgtatttttagtagaggcagggtttcaccatgttggccaggctggtctcgaattcctgacctcaaatgatctgcctgcctcagcctcccaaagtgctggaattacaggagtgagccactgcgcctggccaagagctggattctctgatcattttgctttttgtgcttccagtaagaagagccttggtgaagaaggagaagaaccagtgggcagctcttaccccattagactataacctccacaagacccttccccattgtatttgcagtgcctggccttaggtctggcccataccaggaacagacaaacagatgaattggccatgaatggaaggatggatggatgtctgcctgggttcttggcaggaatgtttctaggggttgttattcgaagccagtttctcaagtgctcccgtggtgcttcctaccgaaatgtctctctgggggatattctggttgtgtcctgcttactgctttggacgtgtggaatatgttgtaagtgccagggccagtaagattggcatcttcttttctcgctgaagactcttgatattcttggaacttaatggtcctcccgatctgatttttctccctggtgtaattagaccagaaaaatgaggaatctaatactataggaccatattaacttagctccttgactcaaagtctccaagggtccccatcattcatgtgaaaaaaactcagcacagtgagtccttgccaggcagctgtgtgtggaagcctcttatgatccagagacagttttatttttttagagacagattcttgctctgtctcccaggctggagggcagtggtgcaatttcggctcacggcaacgtctgcctcctgggttcaaacaattcttctgcctcagcctctcaagtagctgggaatacaggagcccatcaccatgcctggctgatttttggattttagtagagatgggtttcatcatgttggccaggctggtctcgaactcctgacctcaagtgatctgcccacctcagcctcccaaagtgctgggattataggtttgagccactgagcccggctgcagggacagttttgagcttgggtcttcaacttttcttccacatctcttgaactttgtttctgcctccatgtctgctgtatcatgattgggttcaagtgcatgttatataaatctccaattgtcgtggtttatgtcgtggtttattcctcaagttaaggaagccctagggtaagctgtgcccagtatggagacttgatagtcatcaagagcccaggttccccctttcctttttgctccgccatcctcagcacatgacctcatcctcaaggagacctcgtgatcccagatggcggctggagctccagtcatcatgtctttttttatttttttaatcatgtctttattctaagcaataagaaggagaaaggagaagcataaaaattcattacttagttatctgtctgcctttttttttttttttttttttttttttttgagatggagtctcgctctgtcacccaggctggagtgcagtggcgcgatctcagctcactgcaagctccacctcccggattcatgccattctcctgcctcagcctcctgagtagctgagactacaggcatccgccaccacgcctggcttattttttgtatttttagtagagacggggtttcaccgtgttagccaggatggtctcgatctcctgaccttgtgatccacctgcctcggcctcctaaagtgctgggattacaggtgtgagccactgcgcccggccctatctgccttttaagaaacctttgtggaattctccacaagcaacacttgagaaacactggccaaaatttagcctcatgaccacatctagctgcacatgcagtgtagggaatgtagtctttcatatgaatacatttctggaatgtatattccagaattacaaaattgagatatatattggagagataggtttttattttgtttttaatcagaaacaaagagtggatattgggtggtaggtagcagattatgcctcagctggtttgagattcaccttggtttgtctctatagttcaaaggatccttctggaaccaggtggtactgtaattagatggcagtcttacctcgctttcattatatattgattaatttttaacttttttaaaaaacaacatatccaggtaacaaaatctttttttttttttttttttttttggagacagagtcttgctctgtcacccaggctggagtgcagtggtgggaacacagctcactgcagccttgacctcccaggctcaagcaatcctcctgcctcaatcttccatgtagctgggaccacagggtgcaccaccatgcccagctaatttttttttttttttttttttttgtagagatagggtttcactttgttgcgcaggctcaaaatctctaaatttgtgtaagaatagatcttagtctctagtcctttcatcttatttgggtgagttttctcagtctggcatccttcctttcttttctttttacttttcttttcttcttcttccatttcccttccttttgtgtttttagtacagatggggttttaccatgttggccaggctggtcttgaactcctgacctcaagcagtccacctgccttggcctcccaaagtgctgggattataggcgtgagccaccgtgccccacctggtatcctatttttctgagggatcacttccacgtgcagtgttttcaggcatgactccctttcatttaacacatgaaaatgttagtgtgatgttttgccagcacagtgttcatcattattcattctctgaaaatattccacagtcctggtgtcagcaaggcatgcatgttcctttcctttcattgtgataactgggtttgcattcatccatcagtgcccatgtgctcaccatggctgtgcaaggtggccagtttttgttgttgttttgtttgtttgtttttgtttcttttttgagatgcagtttcactcttgtcacccaggctagagtgcaatggcacaatctcagctcactgcaacctccacctcctgggttcaagcaattcttctgcctcagccttctgagtagctgggattacaggtgtgcaccaccacacccagctaatttttgtattattagtagaaacaggatttcaccatgttggccaggctggtcttgagctcacctcaggtgatccacccgcctcagcctcccaaaggaaaaagcctgctgggattacaggcatgagccaccaggcctggccaaggtggctgttttaaggcttaggatacagtggtttttctgggattggtttttgtttttgtttttgagacagagtctcgctctgtttcccaggttggagtgcagtgacacaatctcggctcactacaacttctgcctcccagattcaagctattttcttgcctcagcctcctgagtagcttgaattacaggcacatgccaccatgcctggctaatttttgtatatttatttatttatttatttatttatttatttatttatttatttttgagacagaatctctctctgtcatccaggctggagtgcagtggcatgatctcagctcactgcaacctctgcctcccgggttcaagcaattctcacgcctcagcctcccaagtagttgggaccccgtgtgtgccaccatgcccggctaatttttgtatttttagtagaggcagggttttggcacgttggccaagctgatcccaaactcctgacctcaagtgatctgcctgccttagcctcccaaagtgctgggattacaggtgtgagccaccacgcctggcccaggatacagtgatgatggtcagttttttattttgttcatgtgctggggtcaaatctcaataaaaccataactcagtgttttccaaccagtccaaccatcatctccatcattacctttattgagcacttactatgtttcaggcagtattcacagtgctttaaatgtgcaataccagcatctcatttaatccttccaagaattatatgagataggttctaatattatccccatttcagacattaggaagctgtaatacagagaaattaagtaatatctgcctggggcaaggaggtactgtcatgaggattcaaagccaggcagtctagctccagagcctgcccttggcgcaggctgggctgcctctctaggagacaaacacaggatgtagagggcagagagcataggtgtgtgcgcatgtgtgcacatgtggccagtgtgcagcattggggaagggctctgtgatgatacctggtcatatctcacatgtatctggtgcatcttcaatcttaaagccagaaaatagagctgaactcaaacttggcaagcagtgatcagtgactgtgagtttttatgtggagggtgagagatggaattttcccctggaaactttactgtgttaccagtaatcaccttaaaacacttaaacaatttggcaaatattttccttccattttcaactctcttatttccctgcatgtgcataaagttatctttattgcatatgaaaactgttcaatacaagtctcaaagggtgtttttggcttccatcccaacagcttctgttagaacaaatggaaaccatatagacataatgatacagtgagatgaagagatttatattgatcacaaagtagttcttagtacaagttctcaaaatctacttgttttgggataactccacgttgaggacctgtgtccccaagaaaaatataaaagaggctgggtgcggtgactcacacctgtaatcccagcaaattgggaagccaaagcaggagaatcgcttgagcccaggagttcgagaccagtctgggcaagatggcaagaccctgcctctaaaaaaatttaaaaaatttaaaaaattaggtgcacatggtggtgcatggtggtggatgcctgtagttccagctacttggtaggctgaggtcagaggcttgcctgagctcaggagttcaaggctgcagtgagctttgatcacttcactgcactccagcctgggtgacagagcaagaccctgtctctatttaaaaaaagaaaagaaaagaaatcgaaaacccaaatattcagttgttgagtaagctctgatattaaatcatcagagtataatgttgctgttaaaaattatattatgggctgggtgtggtggctcatgcctgtaatcccagcattttgggaggccacattgcttaagcttacaagttcgagaccagcctgggtaacatggcaaagccctacgtctactaaaaatacaaaaattagtcagccatggtggtgcacacctgtagtcccagctactcaggaggctgagatgggagggatggcttgagcctgggaggcagaggttccagtgagacaagatcttgccgctgtaccccagcctcagtgatagagccagatcttgtctcaaaaaaataaaaatgagattatgtaggcttgaaacagcttgtaaattataatatcaaaccctgaaaccaatacttgtgtatgcatgatgattatttgagctctggacactaagaaggataaaaagagaatgcagtctttacgatatagcaaagggtctcattggtttttgttttgattggtcattttggtggatatatataatttgtcattgataagagaatgtgtcattaaattcaaactgtacactgcccacagaaggctggggacgctgtctggctaggttggactgttagacctgaagtatccgtcttgaattgtcttatcttgttcctcatcttctttccttttaggcctccgtttctggaatccaagcagaattgctcacatttcccaactcctctcctggcctcagaagacagaagagagactgggttattcctcccatcagctgcccagaaaatgaaaaaggcccatttcctaaaaacctggttcaggtagagaaagaagttctctgtttctctgggagggatttggcagagaagtaccaaggagagaaagggaaaagacccagtgttgggatccttctttactaattctttttctttcattttgtcttcagatcaaatccaacaaagacaaagaaggcaaggttttctacagcatcactggccaaggagctgacacaccccctgttggtgtctttattattgaaagagaaacaggatggctgaaggtgacagagcctctggatagagaacgcattgccacatacactgtaagtatctcttagaagcttgttgacaccggggtaacatccacccaggattttttggtcaacccatgctggatccgcagatcagaggctctgaacacatgaggagcttaacttgacacctcttgacctgttgctaaggagaagtgatgggagaacgtgggacagtttggggttgttaatttttctccttgtcaggaagaaaggaaggagaatccgcatgcatcctcatacaaccaggacaaatttagacccaagatgtcaacctgttcttggggctggaagtccctgacctaaaggaacaggacagtgatgatataagggagcaaaacccatttcttgggcttggcagcagcaagagcttaggaaaaccaagaggtcttttttttttttttttgagatagggtttcactctgtcacccaggctggaaccacaacctccacttcccgggttcaagtgattctcctgcttcaacctcccgagtagctggattataggcagctgccatcatgcccagctaattttttgcgtttttattagagatgaggttttaccatgttggccagagtggtctcaaactcctgacctcaggcgattcaccctacttggcctcccaaagtgctgggattacaggagggagccactgcacccggcctacaagaggtcatttgtttttgttttggatttttgtttttttgagaccgagtctacctgtgtcactcaagctggaatgcagtggtacaatcttagctcactgcagcctggaccttctgggcccaagcgacactcccaccccatcttcctgagtagctgagactaaaggcgcaggccaccacacccagttaatttttgtattttttgtagaaacaagatcttgctatgttgcccaggctggtcttgaaatcttgagctcaagcaatctgcccacctcggcctcccaaagtgctgagattacatgaaccactatgcctggccaggaagtcatatattgatgccaaattcagaaatatctgggggaaatgctagactaaaaggaccagagcaagtttcacccggcatggaataagagtttttcaggcccgcatcttcatctctaggcctgatgccctggtcctcgtgtgggaaatgggaggtctgagccgtggggggtgttctccagcccatggctcttaccttgttataatctcactgaagcagcagcagcacatgtgtgagaaaagtcacccactgggggtctcagagcctaggaaggtgtggcagccaggggggcgcactctgctctggctgggccccttctcccatgttttcttcctcatcagagctcaagtcaccctcacttggttctttcagctcttctctcacgctgtgtcatccaacgggaatgcagttgaggatccaatggagattttgatcacggtaaccgatcagaatgacaacaagcccgaattcacccaggaggtctttaaggggtctgtcatggaaggtgctcttccaggtatatccactaatgagaatctgaatactcagaaagactcttaggttctttggaccccaaagtgttgtccaagcccaaaggttgtgtaactaaagctgatccttcctacggacagaacttcttggcaagccattgttgtgttatatgcatgtgtgtaacagtctacctgtggaaacatataaaatagggagagtttaagaacaatcttcccttttttattattaattttttttttttttaggctgggcatggtggctcatgcctgtaatcccagcactttgggaggccaaggtggatgggtcacctgtgctcaggagttcaagaccagcctgaccaacatggtgaaacctcgtctctattaaaaatacaaaaaaattagccggtcgtggtggcgggggcctgtaatcccagctacttgggaggctgaggcaggagaattgcttgaacccgggaggcgggggttgcagtaagctgagatcacgccactgcactccagcctgggtgacagatccagactccgtctcaaaaaaaaaaaaatttttttttcagagacagggtcttgctttgttgtccaggctactttcaaactcccgggcccaagcaatcctcccacctcagccccacaagctgctaagattataggcatgagctactatacctggctaagaacaaccttcctaattaaggaacagatctttaccagtaccttaaagccctaaacaatcccccttggtcacattcttttctctcctccataaagataaccacaccctaggctgggtgtggtggttcacacctgtaaccccagcactttgggaggccaaggtgggcaaatcacttgaggtcaggagtttgagaccagcctgaccaacatggagaaaccctgtctctactaaaaatagaaaattagctgggcgtggcgacgcatgcctataattccagatacttgggaggctgaagcaggagaattgcttgaacccgggagacagagattgtggtgagccgaatcacgccattgcattccagcctgggcaacaggagcaaaactccgtctcaaaaaaaaaaaaaaaaaaaaagataaccacaccctgacttttgtggtaatcattccctttcttttctttattaccatttgtgtatttatacctggataataagttgatagtttgagctttctttctcccctagcactttggtaagaattctaggaattagggaactctgacacggtaccacccccatgtcccctcctttatccctcagggcagaattggattaagcagtattgacccagtcccaaagtgcagcttgtctaaaccttcatctccttgaactcttccaggaacctctgtgatggaggtcacagccacagacgcggacgatgatgtgaacacctacaatgccgccatcgcttacaccatcctcagccaagatcctgagctccctgacaaaaatatgttcaccattaacaggaacacaggagtcatcagtgtggtcaccactgggctggaccgagaggtcaggggtcaggaggatccagagggtgtggaggacaaatgtgtattagctcaatcccgtggacaaagcaaaatcctgctaggccagttgtcagttaatacagtgatggtctaagctttgcatctaagcttgtgcccagaggttccgtgcctagaagacaggcaggctggcatgaagcacatggttaaatattctggttccatgtgttgggctgggctaggccaaaggtggctagtgttcctggtcctgacttggttgtgtcgatctctctgcagagtttccctacgtataccctggtggttcaagctgctgaccttcaaggtgaggggttaagcacaacagcaacagctgtgatcacagtcactgacaccaacgataatcctccgatcttcaatcccaccacggtaattctataactccttagagggtttccaaagaaaggtcttttgttgttcatgaactaagtgtcaccactgctcatgggcgaagtctttgaaaactctctccagactagagaatgttaactttaaacttaaaagcaagcatcttgagatggcagttgtcttttagtatcttttttccacccttggcctggggccaattggtgcaagattgtgaagttgcaaaaagcacctactgatttcatagtctcatggtacatttttatagcaaatattacctggtttcatttctttattgaacaaatattttctaagtttatattaggcactgtgttagacactggagagaccatcacacacaaagattccattctcatggtgtttctggtatagccaggaagacatcttatgagaattattgtatgccaaggatattacatgcattcaaggagaaggtattgagaaccaagtagggtaagtttaaatcatcctgtataatggccaggcgtggtggctcacacctgtaatctagcaagttgagaggccaaggctggtggatcccttgaggatggagtttgagaccagcctggccaacgtggcgaaactccatctccactaaaaatacaaaaattagctgggcgtggtggtgcatgcttgtaatcccagctactcgggcatctgaggcatgagagttgcttgaacccaggaggcggaggctgcagtgagccgagattgtaccattgcaccccagtgcgcccattgcctggcctctccttgtcacatcttctccttgaagcttgctttcagttagccaggtgtggtggtgcatgcctgtggtcccagctactctggaggctgaggtgggaggattgcttgagcccaggaggttgaggctacagtgagccatgatcgctcaaatacactccagcctggtgacagtgagatcttatctcaaaagaacaacaaaaaaagaggaatcctttagccccctgagactcagctctgctagcagtcttggtactttgtaaatgacacatctctttgctctgcagtacaagggtcaggtgcctgagaacgaggctaacgtcgtaatcaccacactgaaagtgactgatgctgatgcccccaataccccagcgtgggaggctgtatacaccatattgaatgatgatggtggacaatttgtcgtcaccacaaatccagtgaacaacgatggcattttgaaaacagcaaaggtttgtatggtacctggcaagatgcagaaactggcatcctcacagctgttcatacccttgtcccctggtatcttcttagaagtagattcgctttggcagggggacagggtgactttcccagattgtagtggaccatgtgggatttgcagtggctcttcctgctcatgtaagaaatcaagaaactgtgctgtgtgtggtggctcacgcctgtaatcccagcacttagggacgctgaggcaggcagatcacgaggtcaggagtttgagtctctgctaaaaatacaaaaattagccaggcatggtggcacgtgcctgtaatctcagctactagggaggctgaggcaggagaattgcttgaacctgggaggtggaggttgcagtgagccaagatcgtgccattgcactccagctctgggtgacagagcaagactcagtctccaggggtgggcggggaaaaggaggccgggcgtggtggctcacgcctgtaatcatagcactttgggaggccaaggcgggcagatcacaaggtcaagagatcgagatcatcctgaccaacatggtgaaaccccatctctactaaaaatacaaaaattagctgggcatggtggtgtgcacctatagtcccagctactagggaggctgaggcaggagaatcgcttgaacctaggagagggaggttgcagtgagccaggatcgtgccactgcactccagcccggcaacagagtgagacttcgtctcaaaaaaaggaaatcaagaagctaaggcttcttggtggctcatggtggctcatgcctgcaatcccagcactttgggaggccgaggcgggcagatcacctgaggtcgggagtttgggaccagcctggccaacatggtgaaaacctgtctctaccaaaaatacaaaaattaactgggcgtggtggtgcacacttgtaatccctgctgcttgggaggctgaagcaggagaatcgcttgagcctggaagacagaggttgtagtgagccaagatcgtgctactgcaccctggcctgggcaacagagtgagactctgtctgaaaaaaaaaagaaatcaagaagctgttacacaggatcctgaaattgaaaaagaagtactatctgctttaataggctctttcccagaaacattctccttccctcagctctttccattttgcggtgacagagaaaatgatttactggtctctgctcttgtgctggtttattttagaagtggggcagatatggttgtttttgaaaaatgtcctagaaacttgaaaactagccaagcgcagtagtgtatggcggtgggcccaactacttgggaggctgaggtgggagaatcacttgagcccagggggttgaagctgcactcagctatgatcatgccactgtactccaacctgggcaatagaatgagactccatctcttaaaaaaaaaaaaaaaaaaagatggccgggtgcagttgctgatgtctgtaatcccaacactttgggaggccaaggcgggtggatcacctgaggtcaggagttcgagaccagcctggccaacatggtgaaacgtcgtctctactaaaaatacaaaaaattagccaggtgtggtggcgggctcctgtaatcccagctactagggaggctgaggcaggagaattgcttgaacccaggaggtggaggttgcagtgagccattgcattccagcctgggtgacaagagcaaaaattctgtctcagaaaaaaataaaataaggaaagaaacttgaaaactaagaatttgagtgaattgcttgttgaagtgactggatccctagaatagccccagctttgccttcctcttgagtaggtgagcagatttgagaagccatggtaagtaattgtggtttctgccattgaaagtcatggcagaaaccacagttacttttgcaccaacctaatatattaccaaaagcaacagttaaggatttaattttatttttactaacacaaaatgtttcgttttgtttttaacttcattgtttctgctctctagggcttggattttgaggccaagcagcagtacattctacacgtagcagtgacgaatgtggtaccttttgaggtctctctcaccacctccacagccaccgtcaccgtggatgtgctggatgtgaatgaagcccccatctttgtgcctcctgaaaagagagtggaagtgtccgaggactttggcgtgggccaggaaatcacatcctacactgcccaggagccagacacatttatggaacagaaaataacgtaagtgtgaggatttttcaactgacttgcagcaactggttattttatatcattttatatgtaaatcaataatatgtacttcatggcattttgtcatttgtctgtacaagaccattctcttaatttattttttattccctttatctgtgctcctttcacctgttcccttcccttcacagacagccgttcttggtctgatgtgctgcctctctttgagctcttgtagtatggtagaaatgcaattttactttgcatacatactattgtgtttttttgagtttggagtctcactttgtcgcccaggctagcgtgcagtggcgtgatctctgcctactgcagcctctgtctcttgggttcaagcaattttcatgcctcagccttccatgtagccaggattacaggtgcctgccaccacgcccggctaatttttgtatttttagtagagacaaggcttcaccacattggccaggctggtctcgaacttctgacctcaagtgatctgcctgcctcctaaagtgctgggattacaggcgtgagccaccgcacccagcccatagtattgtgttctaagtagcttactatcagtatttctcctttcaaacttgaaggtacctctataatgtaaatcacacagatgctgagaactgagaacccacatgccaaccaaccaactacaacacttgctttaaaatactctcattttgggttgggcatagcagctcatgcctgtaatcccaaaacttagggaggcctaggcaggtggatcactttgaggccaggtgttgaagaccagtctggccaacatggtgaaacccctgcctccactaaaaacacaagaaattagctgggcatggtggtacacacctgtaatcccagctactcgggaggctgaggcacgagaatcacttgaacccaaaaagctgaggttgcagtgagctgagatcgagtcactgcactccagcctgggtgacagagtgagactccatctcaaaaacaaaaaacaaaaaaactctcattttctatgtgtagccaatggactcctcataatctagagatatttctacatgctccaaactgtaaggcctggcaagatgggttttaatcgaagtttaaaagaatgatgaaaagtcaaagacaataatgtaggattaggttcagtgatgaaaccctggattgtacagtttccaggctgggttgaaagcttgcagtagtgaaatagatagttcaaagcatctcctggggcagattcagggaccaggtctttagtgtctgtttccagaggcccttacgcctggaacaatgaccacttgatgtaattcattgctttgcacttccaaagaagtgaggccaagcccacagtttcttagagccctttcctcctttgatttcttagtttctctttcagagcctttccatgaccctagtaaataactgagcagtagatctctgttagcctccctgtacctcccattaaatggcaatagtgcagtccacccacaggtcaacagggcaacctgcatctccagatgttcatgacaggagaggaggtggcatgttgccaccatttaggaactactgtattgtttgggggagctggtctgcaggagtctgcttttaaaaataaataaggattatagtaatcattgcttcagcaagaatcatccacagatgccaaatccattgggtgaaaattagttgctgaacaagatattctcaaattatctacctgcagattataggttaatcatgcagtgaaaaaaggcacctttgctgtgaagaaatctggtggcctttcccttatccaagtgatcaaagttatcaatagaagcacagacagacatcatgtgcctcccagtgtcctgcactagggaggccacagcatcacctctgtcctgttcttgcccccaccgacccctgaaatggattacctgaatctaaattttgaggaataatcagacaaacccaagttaaggggcatgctacaaaacaacggccagcacatttcaaaaatgtcagtgacagaaaagaaagacctaaggaagagccatgccaacgaaaggccatattggatcctgaatccagaagggtgcaaggttgctataaaggacatttttggaaaatctgacaattcgaatatgcaccatatattcgacaatagaattctatcaaagttttgtttcctaaaattgaaaatcaagactggtcacggtggctcacacctgcaatcccagtgctttgggaggccgagatgggtggatcatctgaggtcaggagatcgagactatcctggctaacatggtgaaacctcgtctctactaaaaatacaaaaaattagccgggcgtggtggcgggtgcctgtagacccagctattcaggaggctggggcaggagaatggcatgaacctgggaggtggagcttgcagtgagctgagatcacgccactgtactccagcctgggcgacagaacgagactctgtcccaaaaaaaaaaaaaaagaaaagaaaaaaaaagaaaatcaaattggggttatataacagaatgcctttgttcttaggagataacacattgacatatttataagtaaaggaacatgacttctgcaatttatttgcagatggttcagcagaacaagaaattatgtaggcgtgtgtcaatatagacagagcagatgtggcaaagtattaacaatgagtaaactcaggtgaagagttcatggatggtcatcatactattatagtaacttgtctgttgtattgttggttttcttggttttctttttttttttttttttttaaagacggagtttcggccgggcgcggtggctcacgcctgtaatcccagcactttgggaggccgagacgtgcggatcatgaggtcaggagatcgagaccatcctggctaaaacggtgtaaaccgcgtctcaactaacaatacaaaaaaattagccgggcgtgatggcgggcgcctctagtcccagctactccggaggctgaggcagaagaatggtgtgaacccaggaggtggagcttgcagcgagccgacatcgcgccactgcactccagcttgggctacagagcaagactccgtctcaaaaaaaaaaaaaaaaaaaaagaaagaaagggtttcacttttgttgcccaggctggagtgcagtggtgcaatctcggctcactgcaacctccatctcccaggttcaaacgattctcctgcctcaccctccccagtagctgggattacaggcgtgtgccaccacacccagctaatttttgtatttttagtagagacagggtttcaccatgttgaccaggctggtctcaaacccctgacctcaggtgatctgcccacctcagcctcccaaagtgttgggattacaggcatgagccaccgcgaccggcctattgttggttttcaaaataaaaacgttggaagtaaccatataactgaagaagcgcttaagccgttttcagctacatgttgtttgctggtcctattctaaaagccagagcttgtccccgttcagatatcggatttggagagacactgccaactggctggagattaatccggacactggtgccatttccactcgggctgagctggacagggaggattttgagcacgtgaagaacagcacgtacacagccctaatcatagctacagacaatggtaagggggcctcatctgagcctttgctgcctcgacctcctagctagttcagttccttgcccctcccttcttttggagggaagagttcattctttttcttttatcctttttgtttgctggattgatttgtataaatgtatggagtacaagggtaattttgttacatgcatagatgtgtagtggtaaagtcagggcttttagggtatccgtcacccaaataacatgcattgtacccattaagtaattgttcatcatctaccccctcccaccccttggacccttcccagctgccattgtctatcattccacaatctacatccatgtgtacacattatcgaactccgacttctaagtgagaacatgcagtatttctccttatatgtctgattcgtttcacttgagacaatggcctccagtttcatccatgttgctgcaaaagatttctcttttattcttaaacaaaggcattcttattatcaaaaattcaagtgggctgggcacggtgactcacacctgtaatcccagcacttagagaggctgaggtgggaggatcacttgagcccaggagttcaagaccagcctgggtaacatggcaaaaccctgtctctacaaaaagtacataaattagctgagtgtgttggtgagcacctgtaggcccagctactcagaaggctgaagtggtaggattgcttgagtctgaaaggtggaggctgcagtgagccaagattgcgccactgctctccatcctgggcaacagagcaagactctgtctccaaaaaaaaaattgttttttcaagtaattttggtcaaacagaacttacttttcactactcactctttattccttccctaagggaaccaggtaatgatggtttacaatccatttccaaagcttaatacttgtgtgaccttggatttgctgtttaattttttttttttttttgagacagagtcttgctctgtcacccaggctggagtgcagtggtgcaatcttggctcactgcagcttccgcctcccaggttcaagcaattgtcctacctcagcctcccaagtagctgggattacaggtgtgcaccaccacgcccagctaattttttgtatttttagtagaaacggggtttcaccatattggccaagctggtcttgaactcctgaccttgtgatctgcccaccttggcctcccagagtgctgggattacaggtgtgagccaccgtgcctggcctgctgtttaatttttatgtccctcaattcctttacctgaaaaatgttaatacccatgtgggtgaaattagttaggtgttaaatcagttaggtgtgggtccttccagactgcttctgtgtatttaaatacatttataggctgggtgctagggtcacacctgtaatcccaacactttgggggtctgaggtgggagatggcttgaggccaggagttcaagactagcctgggcaacatactgcccataatctcaaaatgctgggattacaggcatgagttatcatgcttggcctccttgagttaattttaaatgacgtgtgctcattgttaaaaaataaaatttacatgagaaaaaagttttaaaaatttacagtcatgccatctagacatatctatttataggtttgagatggattcttctgttgttttgtatccgtatcgtatactaatattgatgatagttccctgggtaccaatttttcctactaccatatgctccgtgttgtgtcaagatataaaagaaatgcaaacagaagtgtggatgggctgggcgcagtggctcacgcctataatcccaacactttcagaggctaagatgcgaggatcacttgagctcaagagttcaagaccagcctgagcaacatgataagaccccctctctacaaaaaaaatttaaaaactagccaagcatggtggcatgcgcctgtagtctcagctactagggaggcagaggtgggagattaagcccaggaggtagaggctgcagtgaactgtgttcatgccactgcattcccgcctgggtgacagagtgagactctgcctcaaaaaaaaaaaaaaaagcgtatgtgaactccccaatctattttgaaaaccaatttgcagagacttcaaaagacccaactcatcccctttgattttaagcttctagtcaggcttaaaattaaaataaataaaaagactcaatgctttgttaatgacctcaaatggcaggaaagtgcagaaaaaggagaactagggaaacaacaggcaggcaataggacttcttggagtagttaaaattcagtgaatgaataacgatatgtgaagaaggaggagtgtgttcttggtgtgaggaataacttgaataattgttatcaaggtgggaataagttgtctgtgtaaaacggccagagacctgcccacctgggagtggaggtcctttgggattggtgggacaggaggttctgcgggtggagtggggcctggtgagggaccactgaagagccaggacaagatctagacttggtctggtggaaggcaatggggattcattactgttgccaagctgccacattttctgtgtattttctcttaggttctccagttgctactggaacagggacacttctgctgatcctgtctgatgtgaatgacaacgcccccataccagaacctcgaactatattcttctgtgagaggaatccaaagcctcaggtcataaacatcattgatgcagaccttcctcccaatacatctcccttcacagcagaactaacacacggggcgagtgccaactggaccattcagtacaacgacccaagtgggtacctgagttttattttggcaactttgctccaactgccatgcttcccttcccccagatccccacctttcaatttcccttctcaacttctagatgtcaccccttccattgatacttgcttccttgtcccttctgtctttgaggccttgctccaaaggtctttttcctttcctggtatctaactttgtagcatgctacccagtaatctaaaacccaagcagggctccctctcccagcctctagccaccctccactcccctctccacttgcaaccaggaccatcttctctgctacctcctgctcctgggaccaaacaacaccatttttgtggttagctccttcttgccaaccaatcgtgagctcccagattcatcagaactattctaccgaggtggaggcagctgtcaactgcctggtcaatttgcatatatgggcttcctacacctacttctctctgggcttctatttccaccatgacgatgtggatctggaaggtgtgcaccacttcttccacaaattggccaaggagaagcacaagggcgctgagtgtcccttgaaaatgcaaaaccagtgtggcggccgcactgtcttcccggacatccagaagccatgtaaagatgaatggggtaaaaccctgggtgcgatggaagtcactctggccctggagaagaacctgaactggacccttttggatcttcatgccttgggttccacctgcacagacccccatatctgtgacttcctggagagccacttcctagatgaaaaagtaaaactcatcaagaagataggtgaccacctgaccaaccttcacaggccagccggcctccaggccgggctgggcaaaaaggttcaccctcaggcacacgggagcctaccgaacccagcgacatctgaagagccccgctctgcctaagcctctccctccagccactaggcagcttttttaaaccaactctagagccctctcccaagccttagaccaaatggaaataaagctttttacagcaaaaaaaaaaaaaaaaaagtacatacctaaataaaacccaagcagctctgctctcttcactcggcttgcgggtgtctttagttcactagcaattttattctggaatgagctttttattttcctcccctggtctcatcatttctttttattgctttctccagcccaagaatctatcattttgaagccaaagatggccttagaggtgggtgactacaaaatcaatctcaagctcatggataaccagaataaagaccaagtgaccaccttagaggtcagcgtgtgtgactgtgaaggggccgctggcgtctgtaggaaggcacagcctgtcgaagcaggattgcaaattcctgccattctggggattcttggaggaattcttgctttgctaagtaagtccagctggcaagtgactcagcctttgacttaaaaaaatggaggaggtttatttcctggaaatgatttttgttcttatattaataaggatataggttagctgatgtgggaaagagactcccaagttatgccagcctccataaaatagaagtttgtctcttactgaacatttcagaggtaaatggtctaagatgggaaggccatgaagtcaacaggggacccaggtttcttctaccttgtctcttttcattcttcaagacagtgcatcccaagcttgagagcatacaaatcatctgggcctctttttgaactgggaaatctgatccaggaggtctggcatagggccacagattctgcatttcttttttttttttttttttttttgagatggagtttcgctcttgttgccgaggctggagtgcaatggtgtgatctcagctcactgcaccctctgcttaacaggttcaagcgattctcccgcctcagcctcctgagtagctgggactatgggcatgtgccaccacgcccagctaattttgtattttcagtagagacggtgtttctccattttggttaggctggtctcagactcccgacctcaggtgatccacccgcctcagcctcccaaagtgctgggattacaggcttgagccaccgcacccggccagattctacatttctaaccagctcccaggcggtactgatgttgcagttccttagaccataggcagagtagcaagaccttgggggctgccctcatcagcgtggtctaagctagccagctcaccaccaccacctctacattccatcctagattggggaaggggataacagaggaagtggaggccaaacgactggaagttgcatatatcacctccacttatataccattggcccaaacacagccacatctagctgcaagggaacctggaagcttctacttacaattgaaaattgacatggagtaggggtggagtgtagggtgagcagtgagtgtcaatgactaaaaggataaaggagaaaaaggatgctgaggaaaattggcagtttctgccatagtccttaaacctgtttccattggagcccacctggagtgagccctaggggtgacacaggagctgttatggtcaaggtaaatacttttatcatttacacacagggagaaagtactgaatctattaaaggaataaattagcgatgaaaacagactatgtgcatcaaaagacaaagtatccatatggaggagtgcactacatcagaactctggtagggctttaaacatgtgaatgatggaagagcaagcaaatgattatcacagcaaatgagagcaagtcaattagaaacctttgacctggtatggtggctcactctttgggagaccagggtgggaggattgcttgaagccaggagtttgacaccagcctgggcaacaaagcaagactgtctctacaaaataaaaataaaaaatacatttttttattaaaaaaaattttttaaaagaaatgtttaaagatcatatataattagtgactgcaaggggtggtccagctcatgaatgcctttgtagtcagggtagtcagaaaaggctgttaattgagtctcaaggacagttttgtggaagatgtaagtggttaggccacaggggctggtagaattccaacaggcagatgggtatttaggaaggttcccctcctagcaaagcacagcagaggcttgaggagactcctagaagagcagagaccaggccaagctggtgggaatggaaaaagaattttggagggagcagtgggaccaaatctagggttttcaatttagattgagcatgggtgccattgatcctgctgctgctgcctcagtggactccaggagagggtgcctttcaaccttccagaaatgtctgctgggcatcccatttgcttctgccccctcctggtgtcctcccaaagttgaagaaaaggatagtgctgttgagaattgagcaagccttctggactttcatcctgccaggctttacatggctttattgtgccatgagattaggttaattcatcattgccttgggcagggtaacacaagccctgcctgcccacttcctagtcaaattacatttcagtggcctggtctgcttttggtatagtggttactgaccagtacattcattctaaagggaatctttttttttttttttttttttttttaggcaagttctcattctgtgggcccggctggagtgcagtggagtgatctcagatctcaggtcactgcagccttgacttccggggctcaggcaatcctcccacctcagacccctgggtggctgggaccacaggcatgagccaccacacccagctaattttttaatatttttttgtagaaacagtgtttccttatgttgcccaggctggtctcaaactcctggtctcaaccagtcctcccaccttggccttccaaagtgttgggattataggcatgagccactgtgcccagccagggaatcttaaagattgtagttatacttgaaatattttttttttaaataggattacctaaatttgctatgggtatgtatttttttagacactgggggtggggattcccatgtagagcaacatttaaaacagaggcaatgccagagttcagatgttcaatttcaatttcttgtatttttaacttctatgattattttttctttctttattagagatgggttctcactatgttactcacattggtctcaaactcttgagctcaagtgatcctcccaccttggcctcccaaagtgctgggattacaggtgtgagccactcctccggccaatttcttgtttcttaagggcacaaatgtgctagaggctgggcacggtggctcacatctataatctcaacactttgggaggctgaggtggcaggattgcttgaacctaggtttcaagatcagcctaggcaacatagcaagatcccatctctattaaaaaaaattactagagagacaccaggagatctgaagcttttcatgttttccgccaatgtttgattgcttactctgtgccaggctttttctcagagcctgcggatactgggcttctggcacagctgataagaggggtcattttggaaacggtaaactgcctcttgctttgcatggatggggactgtgtagctcctatagtcttgttcagtgctgtctccctgtgcagccaattcagtgttcttgttgatgaatcatggacaagggagttatgctgtttatctggataaggtttctggcatttttctggttttagaaataggtagttgaggtacatctgagaaatcttttccccaagtttatgcaacctcctgtttaaagattatgcttcggccgggcgtggtggctcacgcctgtaatctcagcactttgggaggcccaggtgggtggatcacttgaggtcaggagtttgagaccagcctgggcaacatagtgaaaccctgtctctactaaaaatacaaaaattagctgggcatggtggcaggtgcttgtagtcctacctacttgggaggctgaggcaggagaatcacttgaacccaggatgtggtggtttcagtgagctgagattgcgccactacactccagcctgggcaacagagtgagactctgtctcaaaataataataaataaataaataaataaagattatgcttcatagggtacagtatataggtacttgggcacccatggatagaaaacacatggaatctttttttttttcattcacagtgaataatatatgtattttctaagttaagtggtttctttctggctgctttagagattttttttttaaagttaaatgttaattgtgtatatcctagaaataatcccaagatcaaatgtaacccttgtgttaagccttggaagttaaatagattttaaagcttgcttacatgattctatcttaagagaaaataagaacataccaggcaattttatagtctctgtcccactccccatagctggttatgtatcaatcacatttgggctaacctaggagccctgctcacaaaccttcaatggctccaactcagaatcaaagccaaagtcctcacagtggcccatatgtccctcccgccctgcttgcccctctgagctcttctccatgtctcttcccctcatgcaccctgctacagccatgctggcctcctcaccttccctccatcacaccaaacatgctcctcctgcctcaggacctctgtccttactgtttcctctgcctggaacactttcccccagatttgggaaaatgacagtgattgagtttaaaacccatctgaaagttaaggaccatgcttgagttcacatatcactgtctactatgttgtactgtacataccgacttcagggatgtgagtgtcacgtggattgacatcttcaagtgtattgaaggcagctagtggctgtctaactgccccctgtctggtatgaggggtgctctgtgatagctgctgcttctggccttctttatctttggctctcaacacttgctctgtctcccccaccatcccagttctgattctgctgctcttgctgtttcttcggaggagagcggtggtcaaagagcccttactgcccccagaggatgacacccgggacaacgtttattactatgatgaagaaggaggcggagaagaggaccaggtgggttttgaaaaccttggtagctcagtggtgatctctttattcggaagaagcaatgattagtaagaggtaggcatttgaaacagctctgaatcactttggatattatctttttaaggccttacccaagaaagtagacattgtcattgaccatcatcatcatcacatcatcaccaacacagctaacatttattgatcgcatactgttctgcacctcagtgagcgagctgaggcacagagaagctcagtaacttggctaaggtcacacagctaggaagcgacagggctaaatggtctgtctcagagcctgccttcctcattgccattctctggacgtgaacttcagccagattctctttgacatagaacaactggtctgctttgtttcttttgagtttttagctagaccaaactccttttctgtcatggttataccttcagtccctctgtatttcctgattttggagatgatcttaacatcttaccctggagttgtccagggaactgttcagtgtcttggagagcctacttattatagaaagggatccatgggggtctattacagagtcctgtttttgactgaggccacagagtgaggcacaatttactgagctccatacaacatagggaggtgggtgtacagagaaaaatattgttctagatttcagggacttgtaagtctagtttggggataccacgtatattgtatcagtgagcaatagagcaaccaatcgtggaatctcagcggcacacaacatgcgtatctttctcatgtaccgtggggtagctggagcaactgctggtctcatctaagctcatgagaatctgtaggatggctggggctcagcagatttaggcagagtttagctgaatggctctaacctgtgaattgtgtccaggtctgttccatgcaagtctcatctttgtaccagaagctggtgcctttcagacctttgcctgtgtcatatgttactgtcccattggctaagcaagtcacacaacaaagccccagatcgatggatgtatacttttctcacaagctggggttgggagggagtgaatatttgccaaacagtgatctaatcatcatgtcctatgaaaattagtaaggcacacagcctatatctggatccacacatgctactcacaatcctttgggccatgtttttttccagtgctatttgggagacttttagcttgaaaactgtcattttgcattaaactggtaaagatcatacagttggcagtgaaggcatcatccaaccataatctataaactgaacatagccctgtgtgtatgactatttctttcctactcttcattgtacttcaaccttttttctccaaaggactttgacttgagccagctgcacaggggcctggacgctcggcctgaagtgactcgtaacgacgttgcaccaaccctcatgagtgtcccccggtatcttccccgccctgccaatcccgatgaaattggaaattttattgatgaagtaagtaatccacgtggaaagccaaagcatggctcatctctaagctcaggaggagttgtgtcaaaaatgagaaaaagagtctttagattctttcctttactatgttttcagcttgcctgagccctggagccctgttttcctttttctttttttttctttttctttttttttttttttgagacgaagtttcactcttgttgcccaggctggagtgcaatggcgcaatctttgctcaccacaacctctgcccgggttcaagcgattctcctgcctcagcctcccaagtagctgggattacaggcatgcaccaccacactcagctaattttgtatttttaatagaggcagggtttctccatgttggtcaggctggtctctaactcctgactcaggtgatccacctgccttggcctcccaaagtgctgggattacaggtgtgagccaccgcacctggcagcctgtttttcttaatctgtgtctcatctgaattttggatctaatcgtgcttcaaattgcaaagtccatgtggcaaaaccaacaattgcctgaaaggatttagtagatctagaaatgaaactaggaagattctaagtaaatttcattttagtttcactaatggaatttacttcccttgcctcccactgctggttgggatataatgataaatgtacatgacaagcctacctgaggattagaaaaatagaatctgtattgtatatgtcagaaatgcattcagctctaaatacaagatgctgaaacagatgggagtagatttatcttatacaaatagaaagttggggtgagcagtctaggccagtgcatcaggctgttccatgtttctgctccatcatcttagcacgtagacccttcttctcaggcttgttgtctcatgatcacaagatggctgccacacttccagatcttaagtctgtattccagtcaggaaaaagtatgaagaacaaagcagagggcaaaagtctttcttctagcaaactgtcttcttattcaacaagggagttgtccaaccagttattggccagaactatcagaaggttgtgcctgtctgcaagggagaataacaaggcattaaattaattagcttaggataagatgagaaagaacccagtaaagaaatggtccagcaggatctgtttccttaagttatgttctctagtaacttgcttggttactggaatgattttctgggcttgtctgatggtccagtggccctcggtgagtcttcatggtgaggtctgtgtttgctttagctttctttttttttttttttttttttttttttgagacagagtcttgctctgtcgcccaggctggagtgcagtggtgcaatctcagctcactgcaagctctacctcccaggttcacaccattctcctggctcagcctcccgagtagctgtgcctacaggcacctgccatcaagcctggcttttttttttttttttaattttatttttagtagagacagggtttcaccatgttaaccagatggtctcgatctcctgacctcaggtgatctgcctgccttggcctcccaaagtgttgggattacaggcgtgagccaccacgcccggactgctttagctttctatgggagctgtcactgaggactgtgaggcactgcagtgttagaagtgatcaagccacattcattttagccactggaaaaaacaagaaacagaaagaaaccagtttaaccatgccttttatttatttatttatttttatttttattttcattttttgagacagtttcactcttgtcgcccaggctggagtgcagtggcgtaatcttggctcactgcaacctctgcctcctagattcaagcgattctcctgcctcagcctcccaagtagctgggattacaggcaccactaccacgcccagctactttttctatttttagtacagatggggtttcatcatattggctagtctggtctcaaactcctgacctcgggtgatctccctgcctcggcctcccaaagtactgggattatgggtgtgagccaccgctcctgactacagaccccttttagatacatctggattcaggcctttcctccattcatactcatttgcaagtcatcacttgtatttgcagtttttatttaaactataaaaatagtatgctaaaaaagaacaagatcatgtcttttgaggaagcaagatcatgggtggagctggaggccattatccttagcaaactaatgcaggaacagaaaaccaaataccacgtgttctcactcatatgtgggagctgaatgatgagaactcatggacacaaagaagagaacaacagacactggggttcgcttaagggaggagagagagaggagcagaaaagataactactgggtactgggctaaatacctgggtgatgaaataatctgtacaacaaatccccatgacatgagtttacgatttgttacctatataacaaaccttcacatgtactcccaaacctaaaagtttttttttttttaagtatgcttgctattttaaaaatataaattatggtgtgggggtacacacctgtaatcccagctactcaggaggctgaggccagagaatcgcttgaacccaggaggtggaggatgcagtgagccgagatcatgccattgcactctagccttggtgacagagcaagactctgagactccatctcaaaataaataaatatactttatttatttcataaaatgaaaatatataaagaaaaggccgggtgcagtggctcacgcctgtaatcccagcactttgggaggccgaggcaggtggatcacctgagatcaggagttagagaccagcctggccaacatggtgaaaccccgtttttactaaaaatacaaaaattagccgggcatggtggcgcatgcctgtagacccagctacttgggaggctgaggcaggagaatcgcttgaacctgggaggcagatgttgcagtgagccaaaatcacaccattgcactccagcctgtgtgacaagagtgaaaccctgtctctaaaaaaaaagaaaaagaaaaaaaatacaagtccttccttagttcccacacccccactccccagatttaactgttaagcatttggcatttatccttccaggcctttctgggtggaaatgcagcctgcatgcaccagtatgcaaagcttccagctctgcccatcccagctggtggtgtggcagccccactctgatctatggggactccatcctgactggttggtgcttgcatctctcctgcctacatataactcaccatttcactttctctttccatcaacaacatatcctgtgcttctgcatccttccatgacagtgtgtataaatgtacgttgttggtgttcactgctccgtggtgtgccacaagtctgggtgcattgtcgtaccttacatattgctagacttcttgccccagatgacaggtgtgcccttcctttcactaaaagatgcttttgtcccttcttctttagaatctgaaagcggctgatactgaccccacagccccgccttatgattctctgctcgtgtttgactatgaaggaagcggttccgaagctgctagtctgagctccctgaactcctcagagtcagacaaagaccaggactatgactacttgaacgaatggggcaatcgcttcaagaagctggctgacatgtacggaggcggcgaggacgactaggggactcgagagaggcgggccccagacccatgtgctgggaaatgcagaaatcacgttgctggtggtttttcagctcccttcccttgagatgagtttctggggaaaaaaaagagactggttagtgatgcagttagtatagctttatactctctccactttatagctctaataagtttgtgttagaaaagtttcgacttatttcttaaagcttttttttttttcccatcactctttacatggtggtgatgtccaaaagatacccaaattttaatattccagaagaacaactttagcatcagaaggttcacccagcaccttgcagattttcttaaggaattttgtctcacttttaaaaagaaggggagaagtcagctactctagttctgttgttttgtgtatataattttttaaaaaaaatttgtgtgcttctgctcattactacactggtgtgtccctctgccttttttttttttttaagacagggtctcattctatcggccaggctggagtgcagtggtgcaatcacagctcactgcagccttgtcctcccaggctcaagctatccttgcacctcagcctcccaagtagctgggaccacaggcatgcaccactacgcatgactaattttttaaatatttgagacggggtctccctgtgttacccaggctggtctcaaactcctgggctcaagtgatcctcccatcttggcctcccagagtattgggattacagacatgagccactgcacctgcccagctccccaactccctgccattttttaagagacagtttcgctccatcgcccaggcctgggatgcagtgatgtgatcatagctcactgtaacctcaaactctggggctcaagcagttctcccaccagcctcctttttatttttttgtacagatggggtcttgctatgttgcccaagctggtcttaaactcctggcctcaagcaatccttctgccttggccccccaaagtgctgggattgtgggcatgagctgctgtgcccagcctccatgttttaatatcaactctcactcctgaattcagttgctttgcccaagataggagttctctgatgcagaaattattgggctcttttagggtaagaagtttgtgtctttgtctggccacatcttgactaggtattgtctactctgaagacctttaatggcttccctctttcatctcctgagtatgtaacttgcaatgggcagctatccagtgacttgttctgagtaagtgtgttcattaatgtttatttagctctgaagcaagagtgatatactccaggacttagaatagtgcctaaagtgctgcagccaaagacagagcggaactatgaaaagtgggcttggagatggcaggagagcttgtcattgagcctggcaatttagcaaactgatgctgaggatgattgaggtgggtctacctcatctctgaaaattctggaaggaatggaggagtctcaacatgtgtttctgacacaagatccgtggtttgtactcaaagcccagaatccccaagtgcctgcttttgatgatgtctacagaaaatgctggctgagctgaacacatttgcccaattccaggtgtgcacagaaaaccgagaatattcaaaattccaaatttttttcttaggagcaagaagaaaatgtggccctaaagggggttagttgaggggtagggggtagtgaggatcttgatttggatctctttttatttaaatgtgaatttcaacttttgacaatcaaagaaaagacttttgttgaaatagctttactgtttctcaagtgttttggagaaaaaaatcaaccctgcaatcactttttggaattgtcttgatttttcggcagttcaagctatatcgaatatagttctgtgtagagaatgtcactgtagttttgagtgtatacatgtgtgggtgctgataattgtgtattttctttgggggtggaaaaggaaaacaattcaagctgagaaaagtattctcaaagatgcatttttataaattttattaaacaattttgttaaaccattgtcaaatttgttttatttgattccaccacatttccagtcaagagaaaagatgcatggagatggcctcagtcaaaacgtggagaaagaggccgggcgcggtggctcatgcctgtaatctcagcacttcgggaggccgaggcaggtagatcacttgagctcaggagtttgagaccagcctgggcaacgtagtgaaaccctgtctccacaaaaacacaaaaattagctgggcgtggtggcgcgcgcctgtagtcccagctactcgagaggctgagacatgagaatcacttgaactcaggaggcagaggttgcagtgagccgaggttgcgccactgcacttcagcctaggtgacagaggagactccatctcaaaaaaataaaaaaatttttaaaaaacttcatgctgaagtgacttctccagaagtttctatcattctactggatgaacatgggagaaactacattcacatggtaactttatttgaacagtatccatccatgtggcatgtgatgaaaccaataaaattcccatgtccacgggagactgtgtgggccaagctgaaggacgggacagagcaaagtttcaaacgatgttctcggggtcagcaagtgagtacaggccagtggttctctgctggggaagaatgtagccccctcctccatgtgacattttgcaatttctggagtacctggggaggtggtcttgtcaccacatcaaggccaggggtgctgctaaacatccctgcacgggacagttcctcacaacaaagaattatccagcacaaaatgtcagccactgttaagaaaccctggtgtaagcctaaaacttttctctgttgaaggggtatgacttttttctttgggtaattttttattgtaaaatacaacataaaatttatgattttagcccttttgttaagttttcagacagggtctcactctgtcacccgggctggagtgcagtggcacaatcacggctcgctgcagcctcaatctcccagtcacaaatgatcctcctctctcagcctccctagtagctgggactacaggtgttgcaccactacgcccagctaattttaaaaattgttttgtagagacagggatcttgctatgatgcacaggctggtcttgaactcctgggctcaagtgatctgccctccttggcctcccaaagtactgggattacaggagtgagccaccacgttggcctcattgtagccatttttaagtatacagttcaatgacattaagtatattcaaattgtgttgcaaccatcaccactatcttcagaactttttcatcatcccagacaaactctgtacccatttattttcaactgtttttaagtgtacaattcagtggtattaagtacattcaaaatattgtataaccatcagctctggtgttagaactttttcatcattccaaataaattttgtatctagtgggcaataactctccattcctgcctctacccatcccctcctaatcactattctactttccatgtatgtagactcctttaatcatccttttgcatctggctttttttttttttttttttttttgagacggagtcttgctctgtcgcccaggctggaatgcagtggcgcgatctccgctccctgcaagctccgcctcctgggttcacgccattctcctgcctcagcctcccgagtagctgggactacaggcgcccggcttatttgtttgtttgtttgtttgtttgtttgtttgtttatggtatttttagtagagacgggtttcaccgtgttagccaggatggtctccatctcctgacctcgtgatccgcctgcctcggcctcccaaagtgctgggattgcaggggtgatccaccgcacccggccttattttttattttattttattttttgagacaaggttctgctctgttacccaggctaaagtgcagtggcacgatcttggctcattgcaacctccacttcccaggttcaagcaattctcctgcctcagcctcccgagtagctgggattacaggtgctcaccgctatgcccggctaatttttgtatttttagtacagacagggtttcaccatgttgcccaggctggtctccaactcctgacctcaagtgatccacccaccttggcctcccaaattgctgggattacaggcatgagctgccgcgcctggcctgcagtgaaaaaaagatattttggggccgggcttggtggctcacgcctgtaatccagcactttgggaggccgaggcgggtgggtcacgaggtcaggagatggagaccatcctggctaacacggtgaaaccccgtctctactaaaatacaaaaattagcggagcgtggtggcgggtgcctgtagtcccagcaactcaggaggctgaggcaggagaatggcgtgaacccggaaggcagagcttgcagtgagcagagattgtgccactgcactcaagcctgggcaacagagcgagactctgtctcaaaaataaatatatataatataaaatatataaatatataaaaatatgtattttatacatatatatggatccttttatccgtttttgaattgggttgtttgctgttgagttttaaaaacatgtattctggaaattaatcccttatcagatacctgatttcttcacatcctccccagcacttgttcacttgttttgtttttttctatgtattttataatattttttaatttttttaatttattttgagatggggtcttgctctgtcgcccaggctggaatgcagtggtgccacctcggcttactgcaacctccgcctcccgggttcaagtgattctcctgcctcagcctcccaggtagctgggattacaggtatgtgccaccatgcccagctaatttttttgaatttttgtagagatggggtttcaccatgttgcccaggctggtcttgaacttctgacctcaagtgatccaccctccttggcctcccaaagtgctggaattacagaacgtgaggcgggcacctgtaatcctagctactcaggaggctgaggggggagaatcgcttgaaccctggaggctgaggttgcagtgagcagagatcatgccactgcactccagcctggttacagagcgagactccatctccaaaacaaaacaaaaattaaattgtttacagagtacttactatgtgcgaaggtctgtaccagcaaggtaattttggtttttttggaacacggtctccctctgtcacccaagctggactgcagcctcgacctcacgggttcaagcaatcctcccaccctgcctcccaagaagctgggacaacaggcatgtgccaccatgtccagctaagttttatattttttacagagatggagtttcaccatgttgcccaggctggaaattttaacctctgaaaaagtccatggtgaaggcagttgcccccagcaagggtctggaagcacaggagacctggggaacacctcctctgttcttttgctggttcattagatgccaagacactagagttgtgctgtctgagttcaaatcctgattctgtcctttccagctatgagcttagataagtgacctgacctttctatgcctcagtgtcttcatctctaaaatgagggtaattgggccaggtgcggtggctcatacctgtaatcccagcactttgggaggccgaggtgggcagatcacctgaggtcaggagttcgagaccagcctggccgacttagtgaaaccttgtctatactaaaaatacaaaaattagctgggcgtgttggcgcggcctgtagtcccggctacttgggaggctgaagcaggagaatcgcttgaacccgggaggcggaggaggttgcagtgagccaagatcgcatcactgcactccagcctgggcgacagagagagactctgtctcaaaaaaaagagggtaattgtatttgctttatagtgttttgagcactaaatgagttgatatgtacaaagcatttagagtgcagtggcacgatctcagttcactgcaacctccgcctcctggggtcacacaattctcctgcctcagcctcctgagtagctggaattacaggtgtgccccaccacaccaggctaatttttgtatttttagtagagacaagatttaaccttgtaagttatgctggtcttgaactcctgacctcaggtgatctgcccacctccgccttccaaagtgctgggataacaggtgtgagccaccacgcccagccgtacttctgtgttttaataaagctgccaagagcaaaccaaggaaggggctaccagaattcaagtcctataaactaaaattccataagcttaaatacaaaattctacagaaacagggtacttaaagcacatctgaataatttgaggctgggagaagcctgagcgtgtttcttcttctttagacgagggccaatttacgctacagcctcgtggactcaggcactcctccaacatcctatcacacatattaaaatacacccagtgttccacatgggatatattactttgctgcaagaatttttatgggatcttatgacattgcttttgaaattatgcatgacaatttgtgttggctcagcccacagagcctgagagataaaaacagaagagatgtctaggtcttgtaatactttgggataaaggattctcagctctgaatatcctgtaatgatcttttgtaaatcccacaccagtactgcccttagacttaggcctggtggtctcctggccctgggcccatgcttgagaagctccatctggccacctccaccatgccccccaccctgggcaagaaatctgccaggcctgggggacttgcccatccaaatctccaaatcctcaccctcctccaagaccacactccatgttctttgtttgtttgttttttgagacagagtctcactctgtcgcccaggctggagtgctgtggcgcgatcttggctcactcctgggttcaagcgattctcctgcctcagcctcctgagcagctaggattacaggtgtgcaccaccacgcctggctaatttttgtatctttagtagagatggggtttcaccatgttggtcaggctggtctcgaactcctgactggctaatttttgtatttattttatagagacagggtctccctatgttgcccagcctggtgtcaaactcctgggcaaaagaaatcctcccacctcagcctcccaaagtgctgggattacaggaataaaccaccacacccggcccacactctggattctgaggccctggaattccctgcccaaccatcccaggccttcttctagggctttgcaggactcttccctgggtctgccctctggatggtgcactgtgctccccgtctgaagttttgttttgttttttatttttttgagacaaagtctccctttgtcaccaggctggagtgtagtgacgcgacctcggttcactgcaacctccgcctcccaggttcaagaggttctcctgcctcagcctcccgagtagctgggactataggcatacatcactatgcccagtgaatttttgtatttttagtagagatggggtttcgccatgtcggccaggatggtctcaatctcttgaccttgtgatctacccgcctctgcctcccaaagtgctgggattacaggtgtgagccaccgcgcccggcccccatctgcagttctagacccagaggggccaaatggtagctgctctgtggaagggatggggtgtggggtgtggacagaacctgaatgtgcagggctgtgggtgcccacacatctaagtgcccagccttcatggtgcaggatggagatgctggtgagaagaaaaatgggtcagaccagaggtctccattgtggagctctgagacagtctgagaattttgaattcaaacttgatagaattttcaaggtaggaggatagaaaatattttagttaccagtctcttcgcttgatttctaacactgaaacatttaggctggcggcgtgagggcctctacctgtacttttgcaccaaacccctcaagccttccccacacagtgctttacccccgtctcactaaatgtttaacatctcaaaatactcttaaaattttttatttcccaaatgaacctgtgcccatacacaatggagaaaacattgtctaatgacaaaacctggaaaggaatacacaaaataaaaagagcacagtggcaattttgtaggtgatttatttcccattcaaaaatatttttaaggccagaaccggtggctcacgcctgcaatttcagtattttggaaggtcgaaatgggcaaattgcttgagcccaggagtttgagaccagcctgggtgacatggtgaaacgccatctctacaaaaattagccgggtgtggtggcatgcatctgtagtcccagctacttgggaggctgaggcgggaggatcacttgagcaggggaggcagaagttggagtgagccaagatcacaccactgcacttcagcccgggtgacagtgagattctgtctcacacacacacacaagattttattcggaaggctgaggcaggaggatcacttgaggccaggagtttgagacaagtctgggcaacatagagactccatctctaaaaaaaaatttttagcgtttttccctctcaggccctgcattccaaaatgacaaagaaaagaagaaacaagagtcatgccaaaaagggtaatagctatgcgcagcttattctcgcccaaggaccggaccattaagaagtttgtcctttgggccgggcgcagtggctcacgcctgtaatcccagcactttgggaggcccaggtgggcaggtcacttgaggtgaggagctcaagaccagcctagccaagagggcgaaaccttgtctccacaaaaaatacaaaaattagccgggcatgctggggcactccagtaatcccagctactcggggggctgaggccagataattgtttcagcctgggaggcagaggttgcagtgagccgagatcacgccactgaactccagcctaggcgacagagcgagaccccatctcaaaaaataaaataaaaataaaggtcctgccctcaaaaacattgtcctgtgtctgcggcatgactttcagacaacatggtttttcaacgtcccaccaggatttatgtaggtgaaaacctgtttccgataatctgaatctcaaatccattctgttttacatataaaaacagtttggcggagggcatggttttgatagaccctgaattttcgaggaatgcatcaaccatgaaaacagaacacagatcgaacttttactgggaactttactaagttcactgaaaaaaaaaatcatattacccataacaacatttgtagctttacattcacgatggatatatatgcgtgtgtacgtctgtacttaggttttgtttgtttgtttgttttgagatggagtctcgctctgtcgcccaggctggagtgcagtggtgtgatctcggctcactgcaacctcgacctcccagcttcgagcgattctcctgcctcagcctcccgggtagctgggactacaggcgcccgccaccacgcctggctaatttttgtatgtttagtagagacggggtttcaccatatcggacaggttggtctcaaactcctgaccttgtgatctgcccgcctcggcctcccagagtgctgcgattacaggtgtgagccaccgcgcccagcctgaatattgtttttcttatccatacttcactgtaagcagatggaagcatctgtctgcttcattatgtctgccagtgttgagtacctgagtattttcatattgaaatatagctttaatgatacattacttctctcttccttctttacatagcggttaatcatattgagcttctgaaattgtgcgcgtgggcagattagccatttttgggttccctcttaccccccggactaagccgggacggaaaaaaaatgtgaagggggcgttcccgatcgatttggccccgccccatagtgtgcccagagccttctgccacacttaacatggcggcggcggcgccctgccgaggcgcctgagcgggtcgcgagcgtggtgttacactccagtcatggcggcccgacaggccgtgggcagcggggctcaggagacatgcggtctggatcggattttggaggcattgaagctgctgctgagcccgggaggtgagaggacgcatctccgcgccgggctggacccgggactctcagggccgcccggcttccggggctgccctgccttccgcagcgtgcgccccttaggcccgcctcgggaccctccgcccgctgctgggggctttgagcattgtctatgcccgtcctcattacgttcttgaggaaactgaggctcaaggagggcgcgggatccgttgactgctgatattagccaacatctcttgagcatttgccttgtgctgggctctgtcaggcggggccgttatttcattcagtgcttactgcagcgctcttgggagggggatatggacccagctccagagagggtagggcgcccgcgacgtagaaatgtgaggtcctagccgcgtgagggcgcaggggccagcatggacccttgagatttgtacgaaatgccaagaagtccagacatcggaagcagtgacgtttgaaatgggtttggggagagtatttaggggttaccaggcgcttttaatctttgtggtgcgtggacagtttcttcccagtctaaaatctgaagggatattgggagtggttgaagctgctactccttttgcgactgaggacacccaaggctcactgaagaaattaagtaacctgtccaagatcacgtggtcaaattaggggcagaacacggacctaggcccgagatctactgaacccccttctcagaatcagacaaattgttcagtataggggctctgatgttatctggagcttttggaaaggacgtggaagatagagctctgcttatcactggggtgtatatttgggggaagggatgggaagggatctgtagaattagcaagggcacatgaaaggccaaaggggatcacctcccagtctcagattttatacttaaaactgcaaaaacttctgcaaacattacaccacaccagcgggaagtgaacacaagttactaatattagtaaatgagtgcctactaagtatcagtccccatagtaggctgttgacatacacatcatttaatcctcattacgatcccctgggatcggtactacttgtattcaatttttacggatgaaggaccaaggttcaggtacattggaaattgcccaatgtcagactagtaagtggcagaatttgaatttaggttatttccactaaaagtatggtaaatatgctacattgtctcaattaagagtcagactgcaaaatagaattttaagttgctaatcgagaggtcacttgtcttctaacggcaactcttttttttttttttttttgagatgaggtctcactctgttgcccaggctggagtgcagtggcacaatctcggctcactgcaacctctgcctcccaggttcaagcgattctcctgcttcagcctcccgagtagctgggattacaggtgcacaccaccatgcccagctaatttttgtctttttagtagagacggagttttgccatgttggccaggctggtctcgaactcctgacctcaagtgatctgcctgccttggcctcccaaagtgctgggattacaggcctgagccactacacctggcctgcaactctctattgtatgactgagaacacgtttaaataagcaaaaatcctgaaagtaatcatctgttatgaaacatgtatattatgcttcatttatagaagactctctaatctctatgagtatgtggtggagtacacatatatgtactcatttaatttacagaaattcaagcattcctatttgaagaggaattagttcgtgaaattatattattttgtacatgtagtcttatatattatatgaatctgtctactattttatcatattagctgcttagggaatttaaaaatatctgtagtggctgggcgaggtgggccatacctgtaatcccagcactttgggaggctgaggcaggatcccaggagtttgagaccagactgggcaacatagtgatactctgtgtctacaaaaaactaaaaaattggccaggcatggtactacacacctgtggtcccagctactggggaggctgagatgggaggattgcttgagcctgagaggtccaagtctaggctgtggtgaaccatgattacactagtgtgctccggccttgggtgacagagtaagaccctattttgttttttgttttttgttttttttttgagacagagtttcactccatcacccaggctggagtgcagtggcatgatcttgacacaccggaacccccacctcccgggttcgagcaattctcatgcctcagcctcccttgtagctgggactataggcacccaccaccatgcctggctaatttttgtacttttattattttttgagatggaatttcgctcttgttgcccaggctggagtgcagtggcgcaatctcagctcactgcaacctccacctcccaggttcaagtgattcttctacctcagcctcccgagtagctgggattacaggcatgcgccacatgcccggctaattttttgtacttttaatagagacggcgtttcaccatgttggccaggcgagtctcgaactcctgacctcaggtgatctgcctgccttgacctcccagagtactaggattaggattacaggcgcgagccaccatgcccaacctcaagaagtcagctggattttcatatctgcttctccagtctgtcatgataggttgttttgactgaagtacatgaagaaaacctagactcacatagatatgtaactggaaaagggaggagagttcaatcaccttttcaaataattatgtacattcttttatacgattctttcttttttttttttagacggagtcttgctctgtcgcccaagctggagtgcagtggtgcgatctcggctcactgcaacctccgcctcccaggttcaagcaattctcctgccccagcctcccgagtaattgggacaacaggcacatgccactgtgcctggctaattttctttttttttttttttttttagtagagacaggttttcaccatattggccaggctggtctggaactcatgacttcgtaatcctcccgcctcggcctcccgaagtgctgggattacagatgtgagccaccacgtccggtcttttatacaattctaaagctcaacaagataatctctgcatgtattgtgtggggaaaaaagtatcgagaaactcaacaagaggtaataccttttttttttttttgtggcggagtttcgctcttgttgcccaggatggaatgcagtggcgtgatctcggctcattgccacctccgcctcccggattcaagcgattctcctgcctcagccttcggagtagctgggattacagacatgcgccaccacgccctgctaattttgtatttttagtagagatggggtttctctacgttggtcaggctggtctcgaactcctgacttcaagtgatctgcccacctcagcctcccaaagtgctgggattacaggcgtgagccaccgcgcccggccaaagaggtaatatattaaagatttgttgcaatatgaaatcagaactcatatcaataagcctcatagtacattcttgagaatctaaaaggcacatcatgacctagtattattatgaaatggttttgaccttgcagaccccctgagagggtcttgggaacccccggcaagccaggtccccatagcatactaggaactgctactttatggaaatgcctccaatttatttccaagtagatgttattttcatcaccagtagagggcagagaagactacttcattaaaggggctctggaaaaacttcagtaagagcttttgttttaaatcactttctttgtgttccatgtttgggttcgaagatcttatgccacaggaagtcatttagaggttggttagtgatcttaacggttagtggcaacaagagggaaataacactcatttccgtttgaggtatacattagccaaaggaaccagatattcatgccagtgggtcagaacacttgtcctggaaagtcctagaagaatattgcaggctgagcgcggtagctcacacctgtaatcctagcactttgggaggccatggcgggtggatctcccgaggtcaggagttcgagaccagcctggccaacatggcgaaaccccgtctctactaaaaatacaaaaattagctgggcgtggtggcatgcgccggtagtcccagctactcgggaggctgaggcaggagaatcgcttgaacccaggaggcagaggttgcagtaagctgagatcgtaccactgcactccagcctgggtgacagagtgagactccatcacaaaaaaaaaaaaaaaaaaaactattgcaaatttcttacacttctgttctcattatttttgaaggatgttattgtttctctctctctctctgtttctctctctctcttttaaatagagacagggtctccctgtgttgcccagccgggagtacagtgactattcacagaagtgatcatagtacactgcagcctcaaacttctgggctcgggtgatgcttctacctcagcctcccagctagctgggactacagggatgtcactgtgacagctttccttttattcttttttaaaaatagaagtaatgtttttacttctataaaaaatattatagcaaagattttttaaatatagagaaaccaaaaagaagaaaattaaaattaccttaatttcactacccagagggtaccactattagcaattcagagcgtattatttttcctttttacaaaaatgatctcatatgccacatactgttttataaccctaaaataacttctagtgcagagacaatacatatttattgtaaaaaaacaattgaaactataattaggtaaaaagaaaaatcctacctctaaccctatcacccagagatcaccactattaaaacctcaaggtattaaaactttgagacccttttctgtgcatataaacacgaatatattttaatatagttagaatcattctgttcctttattgaccaattttcagaataataaattagtgtcttagcaacctccaaaggtaaccaatgaagtgatcttttttgttgtattatgaatcatagattttatgtatttgatgtttcaattattgtattccttgttcttaatcaaatttcccatttttggcctctgggaaccatttccgactggctcttggggtttttgacatgaccatgatagtctttgatcgactccttgctctcaagcagaagatatcccaggctcatctgaggtatttcctgccccatttttgaaaacaactctctctaaggagaagtggtatttagcaaccgcaatgcggacacaggatattcattgctattgaaattatgggccgagtgcagtggctaacgcctataatcccagcactttgggaggccgaggtgggtggatcacttgagatcaggagttcgagaccagcttgaccaacatggcgaaaccctgtctctactaaaaatacaaaaattagccgagtgctatggtgggctcctgtaatcctagctacttggaggctgaggcaggagaactgcttgagcccctgaggcggaggtggcagtgagccgagactgtgcaactacactccagcctgggcgacaaagtgagaccctgtcccaaaaaaaaagaaattatcattggctggatgtggtggctcatacctgtaatcgcagcattttgggaggctgaagtgggcagattgcttgagcccaggagttcaagactaccctgggctacatagtaaaacactgtctctacaaaaaatacagaaattaaaaaaaacaaaatacagaaattagctgggcatgatggcacatgcctgtggtccccgatgctttggaggctaagataggagggtcagctgagccccggagtttgagggtgcaatggactatgattataccactgcactccagcctgggtgacagagtgagaccctgtctcaaaaaaaaaaatgaaaaggaaaaagaaattgtcattgctttcagactttttgaaggattagagccaggaaatatgtggatttttagaaaatgaaaataaatcttgagttcttaccagtatttccaattgaaatgaaatagaatggatttttttattttataaattttttctaacatttcattatgaaaatttgaaattatgaagctgacagaaaagttgaagaacttttacagtgaaaataccatgaccttcattctatagttacaattttactgtaattgcttgattacatatttgtctttctagcggttcttttttttttttttttttttgagacggaatcttgctctgttgtccaggctggagtgcagtggctcaatctccgctcaccacagcctccgcctcccaggttcaagcgattatcctgcctcagcctcccaagtagctgggactacaggcatgtgccaccaagcccggctaatttttgtatttttggtagagatggggtttcactatgttgaccagtctggtctcgaactcctgacctcgtgatccacccacgtcagcctcccaaagtgctgggattacaggtgtgagccactgcgtccagcctctagctgttcttttatcctatattttatatttttatatttgtatttcttttatctgagaatattggttcctaatgaaattaatgtattatatatgtgcatgtatacatacccatacatatataaatatataatcacacattatataaaatgtgtaatcacacaatacatactcatccaggtctataatcttttcaaagaacaaatccaacattaccactacaaacccactgtttaaggggtttttgtttggtttttgttctcaggatatacaaaattctttatttcaagtctcttaaaataattttctgtgtggttatgctgctaacttaatatagagtaggagttagtaaactttttctctgaaggaccagatagtaaatattttgagctttgcggcccatatggtctctgttgtaactactcaactctgtcactgtatctcaaaagcagccatagactatatgtaaatgggcataactgtgttccagtaaaaccttattcatgaaaacagttggtgggccagatttggactgcagatcatagtttggtgacctttgacatagagcgcagaatttggttcattggttcatttgtttgtttttcatttttaggaattgttttgcattttctttttgatttaatttttttaactatgaaaaacatctgttgtgctctaaaactaataaaattagatacagttatccatgtttcctcctctgctctctccctctctctgtagatgacttattttaattagctttaaatttattcttaaattgcttcttttttgaaaagacatgcaaataatctgtgatttcctattcattcccatttttacacaaaaggtagcatactatatatatttttttctgcgtcttttaattttaattttatttttatttttgagatggagtctcgctctgtctcccaggctggagtgcagtggcgcaatctcggctcactgcaacctccgtctcccaggttcaagcgattctcctgcctcagcctcccgagtaactgggattacaggtgcctgccaccacacctggctaatttttttatttttagtagagacagggtttcaccatgttggtcaggctggcctcgaactcctgaccttgtgatccgcccacctcggcctcccaaagtgctgggattacaggcatgagccaccacgcccggcctgcatcttactttttaaatttagtgtcttagcaatcggtacatgatggtacgtataaatcttccgttttctcttttatagctgcatagtttattcaaccagttctctactagtggacatttgggttgttttcaagtcttttgctaatttaagaagtactgcaatgaatagtcttgtaaatacgtaattttgcattgtttgcctgtgtatctataggatagattcctaaaagtgggattgctgggccaaagggaaatgcctatgtaattttgctagatattgccaaatttctgtccttggggatgtaccattttagttcctaccaacaatgtatgagagtgtgtgtttcctcacagacttgctacagaatgtgttataaaacttttggattttagccagttcgatagatggaaagtgatatttcagtataactttaatttacttttctcttattatgagcaagattgatcatatgttcatgtttaagggccatttgcatttcttttcctataaactgtctgtatcttttgctcatgtaatgttttatactctttgttcacattcgaatatattatgaacatgtcattaaataatgttcagcatttaatggctacaaaatattccattgtttattcattcaacaacaatttattaaacagcttttacttgtcaggctttgttccaggcaaagagaatacagcagtgaacaaaacaaatcaatacccctgttttctaggtgctttgattctagttggtagaaagacaataaacaataaacaaaataagtacttcacatacatatagtatgttagatagaattagaccataatttactcaacaaacacctgttatgggacatgcatttctaattttacactattataaatcatgcagtattggacatagttattatcaattacattttgattccttctaatttgtttcttacaaggtatattagctttagttttgaggtctgttgcttgtatttatattttcaaaaaaaaaatttagtttatttgacctggctgatgtccatatatattttcaaaattttattatggttttctaaacaaatagaaaagctcgtggccaggtgcagtagctcatgcctgtaatcccaacactttggggaggctgaggcgggaggattgcttgagcccaggaggtcaagaccagcctgggcaacatagtgagacccccacatctctacaaaagatgaaaaaattagtcaggtggggtggtatgcaactgtggtcccagctactggagaggctgagatgggaggactgcttgagcccaagaatcaaaggtacagtgaattgtgattgcatcactgcaccccagcctgggtgacagagcgagacccccgtctcaaaaagaaaaagaaaaaaagaaaagttgaaagaattatatggcgaacacccttatacacatcatttagattccacaattcacattttattatatttgcttgatcacatttctatccatttatccatgcatcaactcatgttttctctttttttgatgcgttcaaagtaagttgcagatatcagtacattttagccataaacacttcagcattgtaacattaactagagtttaatatttatttgggttttttgtagttcatttgttttaggtaaaatttatatacaatgaaatgcacaaataatacatacatcattcagtgagttttaaaaatgcatgtacttggctgaggcatgagaatcacttgaacccaggagacagggtttgcagtgatctgagatcacaccactgcactctagcctgggtgacagagcgagactctgtctaaaaaaaaaaaaaaagcatatacttttgtcattgaaacccctgtcaagatacacattgttacttccaggtgagaaaaggaaaaaaaaaagaaacctaaagaaaaaacagatatgcatcattactattatcccagaaagttcccttctgccctttcacaatcatttcccactcctgctcccctagagataactggttctaggttttttaacccgtagattagttttgcctattctagaatttaatataaacaagaaacatctttttggctatgtgggctgtttccagttttggggtattatgaatagtgctgctatgaacattcttgtacaagtctttgttatgaaaatgtatattgtgtattaatttttcttggacaagtatgttagagtggaattgctggattatagggtaggtatatgtttggttttctaagaaactgccagaccaactgagctttgatcatgtcatacttctgccaacagtgtatgagagttccagttgcttcacgtcatttggtagtgtcaatctttgtaaattttaaccattccagtgtatgtagtggtatctcattgtggttttaattttcatttccctaataattaatgatattgagcatcttttcatatgcagttggtcatttgaataacttcttttttgaagtatctgaataattgtccatttttttaaaaaatagtttgttttattgagctataaactgttttcatatattcaggatcaatgcgtttgtcatatatatgtactgcaaacattttctccctatctgtggcttgccttttcatttttagaactgtatattttgaaaataagttttaaattttgatgaagtccagtttttttccttttggctcatgctttttatgttttaagaattctgtctgggcacagtggctcacacctataatcccagcactttaagaggcagaggcggaagaattgcttaagcataggagttcaagaccagcctgggcaacatagtgagacctcatctctataaataattagtcaagcatggtggcacacaattgtaatcctagctactagggagctgagacaggaggatcacttgaacctgggagattaaggctgcagtgagctggaatcaggccactgcactccagcctgggtgacagagcaagaccctgttgcaaaaaaagaaaagaaacaaaccaaaataaaacaaaaaacaagaaattgttgtctactctaggatcataaaagactttcttctgtgttttcttccagaagttttatagtttagattttgtatttatgatctgttttgggttaattttggtgtgtggtgtgaattaaaggtcaaagtttttttttttttttttccccatgtggatatccagttgttccaacctcatttggtaaaggaattttctttcccagttgtattgatttcatatctttattgaagatcaaatagccatataagtgtgggactgtttctgggttcccaattctgttttaccaatctacctaacagtccttatgccagtaccacattgtctttaatttctgtagttctatagtaagttgggtagtataagttctctaacattgttcttgactgttctgggtcttataggtttctatataaattttttaatcagtttgtcaatttctgcaaaaaggtctgttgagattcttattgtaattgcgttgactttatagatcaatttgtggacaattgccatcttttttctttttttttttccaagacagagtcttgctctgtcacccaggttggagtccaatggcgtgatctcagcttactgcaactacccagctacctgggaggctgaggcaggagaatcgcttgaacctgggaagtggaggttgcagtgagctgagatccgccattgcactccagcctgggtgacaagaatgaagctccgtctcaaaaaaaaataaaacataaaaaatttctcagcaagttttcagtgtagagagtttgtatattttgtgttaaatttatcctaaattaaagttttaggccaggcgtggtggctcacacctgtaatgccagcactttgggaggccaaggcagacagatcacctgagctcaggagtttgagaccagcctgggcaacatggtgaaaccccatctctactaaaatacaagagatcacccgggtgtggtggcatgcgcctgtagtcccagctactggggaggctgaggcacgagaattgcttgaacccaggaggcaaagcttgcagtgagccaagattgcacc
